United States Patent Application Publication US 2025/0074962 A1 - sequence listing, part 19

SEQ ID NO: 32535 - DNA, 1434 bp, synthetic construct
  misc_feature 1..1434: note = Description of Artificial Sequence: Synthetic coding sequence
  source 1..1434: mol_type = other DNA
atggaccgctcgctgggttggcagggaaactcggtgcctgaggatcgtactgaggccggcatcaagcgctttctggaggataccactgacgacggtgaactgagcaaatttgtgaaagatttttcaggcaatgctagttgtcatccgcccgaagccaagacctgggcgagcagaccgcaagtgccagagccgcgccctcaggcccctgacctttacgacgacgacctggagtttcgcccaccgtctaggccacagtcaagtgataatcagcagtacttttgtgcgccagctccactctcgccgagtgcgcgcccgcggtccccgtggggaaaactggatccgtacgactcctcggaagatgacaaggaatacgtggggttcgctactctgccaaaccaagtgcacaggaaatcagtcaagaaggggttcgacttcacgctcatggtggcgggggaatctggactgggcaagtcgaccctcgttaattccctgttcctgaccgacctctatagagatcggaaactgctgggcgctgaggagagaatcatgcagactgtggaaatcactaaacacgcagtggacatcgaggagaagggagtgcggctccgcctgaccattgtggatacccccggcttcggggacgccgtgaacaacactgaatgctggaagccggtcgcggaatacatcgaccagcagttcgaacagtacttccgggacgaaagcggattgaatcgaaagaacatccaagataaccgagtgcactgctgcctgtacttcattagccctttcggacacggactgcggccgcttgatgttgaattcatgaaggccttgcaccagcgcgtgaatatcgtcccgattctggcaaaggcagataccttgactccccccgaggtcgaccataagaagagaaagatcagggaagagatcgagcatttcggtatcaaaatctaccagttcccggattgcgattccgatgaggacgaggacttcaaactgcaggaccaagcccttaaggagtcgataccatttgccgtaatcggttcgaacaccgttgtggaagcacgcggaaggcgcgtccggggacggttgtatccttggggcatcgtggaggtcgagaatcctggacattgcgacttcgtgaagttgaggaccatgctggtccgcacgcacatgcaagatcttaaagacgtgacccgcgaaactcactacgagaactaccgcgcgcagtgcatccaatcgatgactaggctggttgttaaggaacggaaccgcaataaacttactagggaaagcggaacggacttccctatccccgccgtgcctccgggaactgatccggaaaccgaaaagctgattcgggaaaaggacgaggaactcagaagaatgcaagaaatgctgcataagatccaaaagcagatgaaggagaactac

SEQ ID NO: 32536 - DNA, 1434 bp, synthetic construct
  misc_feature 1..1434: note = Description of Artificial Sequence: Synthetic coding sequence
  source 1..1434: mol_type = other DNA
atggatcggagtctgggatggcaggggaattctgtccctgaagatcgcacggaagccggtattaagaggttcctagaggacacgacggatgatggcgaactgtctaagttcgtcaaagattttagcggcaatgcttcttgccatcctcccgaagcaaaaacatgggcgtcacggccgcaagttccagaacctagaccgcaagcacctgacctttacgatgacgatctcgaatttcggccgccgtctagaccgcagtcatccgataaccaacaatatttttgtgcaccggcccctctttcaccttcggctcgtcctcgttccccgtggggaaagctggatccctatgacagctccgaagatgataaagaatacgtcggatttgccaccttgccaaaccaagtgcataggaaatccgtgaaaaaaggttttgacttcacgctgatggttgcaggagagtcaggtcttggaaaatccacgctggtaaatagtttgtttttaacggacctgtatagggatcgcaagttattaggcgcggaggagcgtatcatgcaaacggtcgaaatcacaaagcatgcggtcgatatcgaagaaaaaggcgtcagactgcgcttaactattgttgatacacctggctttggcgatgcggtcaacaacaccgagtgttggaaacctgtggctgaatatattgatcagcaattcgaacaatatttccgggacgaatctgggctaaaccgtaaaaatatacaggataatcgagtgcattgttgcttatactttatttcaccgtttggacacggtttacggcctttagatgttgaatttatgaaagcgcttcatcaacgggtgaatattgtgcctattttagcgaaagccgatacgctgacaccgccagaggttgatcataaaaagagaaaaatcagggaagaaatagaacacttcggaatcaaaatttaccaattcccggattgcgattcagatgaggacgaggatttcaaactacaggatcaggcgctcaaggaatcgatcccgtttgcagtaatcgggagtaacactgtggtagaagcacgggggagacgcgttagagggagattatacccttggggtattgttgaagtagagaatccaggacactgcgattttgtcaaattgcggacgatgctggtccgtactcatatgcaggatctgaaagacgtaacccgtgaaactcactacgaaaattatcgtgcccagtgtattcagagtatgacacggctggtagtcaaagagagaaacagaaataaattgacgagagaatctggcacggattttcctattccggccgtacctccgggtactgaccctgagactgagaagttgatccgggaaaaagatgaagagttgcggcgcatgcaggaaatgctgcataagattcaaaagcagatgaaagaaaattat

SEQ ID NO: 32537 - DNA, 1434 bp, synthetic construct
  misc_feature 1..1434: note = Description of Artificial Sequence: Synthetic coding sequence
  source 1..1434: mol_type = other DNA
atggaccggagcctcgggtggcagggaaactcagtgcccgaagacaggacggaggcaggcatcaagagatttctcgaggacactacagatgatggagagctttctaagtttgtaaaagactttagtggtaatgcatcctgccacccacctgaagctaagacttgggccagtcgtcctcaggtacccgaaccaaggccccaggcacctgatctttacgacgacgacctggaattccgaccaccgtcccgtcctcaaagctctgacaaccagcagtacttttgcgcccctgcacccctgtctcctagtgccagaccacggtcaccctggggcaagctagatccttatgacagttccgaagatgacaaggagtacgtgggtttcgccacgttgccgaatcaagtccacaggaaatctgtcaagaaggggtttgatttcacattgatggtggccggcgagtccggactggggaagagcactctcgtgaattcactgttcttgaccgacctgtatagggacagaaagctcctaggagccgaagaaagaattatgcagactgtcgaaatcaccaaacatgccgttgatattgaagaaaagggtgtgcggctgcgtctgacaattgtcgatacgcctggctttggagacgctgtgaacaacacggaatgctggaagcccgttgccgagtatatcgatcagcagttcgagcaatactttcgtgacgagtctggcctgaatcgaaagaatattcaggacaatagagtgcattgttgcttatactttatcagcccatttggtcacggccttcgccctttggacgtggagttcatgaaggctctccaccagagagtcaatattgtacccatcttggccaaagcagatacactgactcctcctgaagtcgatcacaaaaaacgaaagatcagggaagaaatcgaacacttcggaattaagatctaccaattcccagattgcgattctgatgaggacgaggattttaaattacaggatcaggccctgaaggagagtattcctttcgctgtgatcgggtccaatacagtggtggaggcgagaggtcgtcgagtcagggggcgtttgtatccctggggaatcgtggaggtggagaaccctggtcactgcgactttgtgaagctgaggacaatgctggtgcgtactcacatgcaggatttgaaggatgttactagggagacgcactatgagaattaccgcgctcagtgcattcagtctatgacgagactggtggtaaaggagaggaaccgcaacaagctgacgcgcgaaagtggaacagacttccctatccccgctgtgcccccgggcaccgaccctgagaccgaaaagcttattcgcgaaaaggacgaagaactccgtaggatgcaggagatgttgcataaaatccaaaagcaaatgaaagagaattat

SEQ ID NO: 32538 - DNA, 1434 bp, synthetic construct
  misc_feature 1..1434: note = Description of Artificial Sequence: Synthetic coding sequence
  source 1..1434: mol_type = other DNA
atggacaggagcctgggctggcagggaaattctgttcccgaagaccggactgaagctggaattaagcggtttttggaagataccaccgatgatggggagttaagtaaatttgtgaaggacttctccggcaacgccagttgtcacccacctgaagctaaaacatgggcaagtcgccctcaggtcccagaaccccgaccacaggcccctgacctctacgatgacgatcttgagttccggccaccaagtcggccccagtctagcgacaaccaacaatacttttgtgcacccgctcctctcagccccagcgcaagaccacgcagtccttggggcaaactcgacccttacgatagctctgaagacgacaaagaatatgtgggcttcgccactcttcccaatcaggttcaccgaaaatcagtcaagaagggcttcgacttcaccctgatggtggctggggagtccggcctcggaaagagcacactggttaatagcctgtttctcaccgatctgtaccgagatagaaaactgctgggcgcagaagaaagaattatgcagactgtggaaatcacaaaacatgccgtggacatagaggaaaagggtgtcaggctgcgactgacaatagttgacacaccaggatttggtgatgcagttaataatactgagtgctggaagccagtcgcagaatatattgatcagcaattcgaacagtacttcagagacgaaagcggcttaaacagaaagaatatacaggataaccgggtgcattgttgcttatacttcataagcccctttgggcatggtttgaggccactggacgtggaattcatgaaggctctccatcagcgggtgaacatagtgcccatactggccaaggcagacactctgaccccccccgaggtggatcataagaaacgcaaaatccgtgaagagatcgaacacttcgggatcaaaatttatcagttccctgactgtgattccgacgaggacgaagattttaagctacaagatcaggcactaaaggagagtattccattcgctgtcattggatctaatactgtggtggaagcaagaggccgaagagtgcgcgggaggctctacccctggggtatcgttgaggtagaaaacccagggcattgtgactttgtcaagctccgcacaatgctcgtgcggacccacatgcaggatctcaaagatgtgacccgcgaaacacactacgagaactaccgggcacagtgtattcagtccatgacacgtctggtggtgaaggaacggaatcgaaataagctgacccgggaaagtggcactgatttcccaattcccgctgttccacctggcactgatccagagacagaaaaactgatacgcgagaaagacgaggaactgcggcgcatgcaagaaatgttgcataaaattcagaaacaaatgaaagaaaactat

SEQ ID NO: 32539 - DNA, 1434 bp, synthetic construct
  misc_feature 1..1434: note = Description of Artificial Sequence: Synthetic coding sequence
  source 1..1434: mol_type = other DNA
atggatagaagcctgggatggcaaggaaactccgtgccggaagatcggacggaagctggcatcaagcgctttttggaggataccactgacgacggcgagctgtcgaaattcgtgaaggactttagcggaaatgcatcatgccatcctccggaggccaagacttgggcatcacgtccgcaagtgccggaaccacgccctcaggccccggatctttacgatgatgacctcgagttccgcccaccgagccggccacagagcagtgataatcagcagtatttctgcgctccagcgccactgtcaccatccgcgcgcccccgctcaccttggggcaagctcgatccctacgattcgtccgaggacgacaaagaatacgtgggtttcgcgactttgccaaaccaagtccacaggaagtccgtcaaaaagggattcgatttcacccttatggtggcaggggagtcgggcctcgggaaatcaactctcgttaattccctcttcctgaccgacctctaccgcgacagaaagctcctgggggcggaggagcgtatcatgcagacggtggaaattaccaagcacgccgtcgacattgaagaaaagggtgttcgcctgcgattgaccattgtggacacgccgggctttggagacgccgttaacaataccgaatgctggaagcctgtcgcggagtacatcgatcaacagtttgaacaatacttcagagacgaatcgggcctcaaccgcaagaacatccaggacaatagagtgcactgctgcctgtacttcatctccccgttcggacatggactccgaccgctggatgtagagttcatgaaagcactgcaccagagagtgaatatagtgccgatcctggccaaagctgacactctgactcctcccgaagtggaccacaaaaagagaaaaatccgcgaagagatcgagcattttggaataaagatctatcaattccctgactgcgactctgatgaagatgaggatttcaagctgcaggaccaggcccttaaagaatcaatccccttcgcagtcattggcagcaacaccgtagtggaagcccggggacgcagagtgaggggaagattgtacccgtgggggatcgtggaggttgagaacccaggacactgtgactttgtgaagctccgcactatgctggttagaactcatatgcaagacctcaaggatgtcacccgagaaacccattacgaaaactaccgagcccagtgtatccaatctatgaccagactggtcgtgaaagaacgcaatcggaacaagctgacccgggagtccggcaccgacttcccaatccccgcggtccccccgggtaccgacccggagactgagaagctgatccgggaaaaggacgaggagctgaggcgtatgcaggaaatgctccacaagatccagaagcaaatgaaggaaaactac

SEQ ID NO: 32540 - DNA, 1434 bp, synthetic construct
  misc_feature 1..1434: note = Description of Artificial Sequence: Synthetic coding sequence
  source 1..1434: mol_type = other DNA
atggaccgatccttgggttggcaaggaaacagcgtgcctgaagaccgaaccgaagctggaataaagcggtttctggaagatacgacagacgatggcgaactgtccaagtttgtgaaggacttctcaggtaacgctagttgccacccccccgaggcaaaaacctgggcatccagacctcaagttccggagcctaggcctcaggcccctgacctgtatgacgatgacctggagtttaggcccccaagcaggccccaatcctctgacaatcaacagtatttttgtgcccccgcccctttgagcccatcggcccgacctcgcagcccctgggggaagctggacccgtacgacagctcagaagatgataaagagtacgttgggttcgctaccttacctaaccaggtccatcgcaagtccgtcaaaaagggctttgattttacactcatggtggctggagagagcggcctggggaaaagtaccctggtgaatagcttgtttctgactgatctatatagggaccgtaagctgctgggagccgaggaacggattatgcagactgtcgagataacaaagcatgccgttgatattgaagagaagggggttaggctgcgtctaacgatagtggacaccccaggatttggagacgcggtgaacaataccgaatgctggaagcctgttgcagagtatatcgatcagcagttcgaacaatatttcagagacgaaagcggattaaacaggaagaatatacaggacaacagggtccactgctgcctttatttcatcagtccattcggtcatgggttgcggccactcgacgtggaatttatgaaggcgctgcaccaacgcgtgaatatcgttcctatcttggcgaaggctgacacgctgacccctcccgaagtggatcacaagaagcgcaagatcagggaagaaattgagcatttcggaattaaaatctaccagttccccgactgtgactcagatgaggatgaggactttaagctccaggaccaggcgcttaaagaaagcatcccctttgccgtaatcgggtccaacacagtcgtggaggcgaggggaagaagagtgagggggagactgtacccgtggggtatcgtggaagtagagaaccctgggcactgtgactttgtaaaactgcgtaccatgctcgttaggacgcacatgcaagatctgaaagacgtgaccagggagactcattacgaaaattacagggcccagtgtatccagtctatgacacgcttagtcgtgaaggaaaggaataggaacaagttgacgcgggaatcaggtactgatttccccatacccgccgtcccccccggaacagaccccgagaccgagaagctaatcagggaaaaagacgaagagctccgccgcatgcaggagatgctgcataagattcaaaaacaaatgaaagaaaactac

SEQ ID NO: 32541 - DNA, 1434 bp, synthetic construct
  misc_feature 1..1434: note = Description of Artificial Sequence: Synthetic coding sequence
  source 1..1434: mol_type = other DNA
atggatcggtcgctgggttggcagggaaacagcgtccccgaagatcggaccgaagcaggtatcaagcgcttcctggaggacaccacggatgacggcgaattgtccaaatttgtgaaagacttctccggaaacgcctcctgccaccctccggaggccaagacttgggcttcaagacctcaagtgcctgaaccgaggccacaagcgcccgacctctacgatgacgatctggagtttcggccgccaagccgcccgcaatcatcggataaccaacaatacttctgcgcgccggctcctctgtcgccgagcgcccggcctaggtcaccgtggggaaagctggacccatatgattcgtcggaggacgacaaggagtacgtgggattcgccaccctgcccaaccaggtgcacagaaagtcagtcaagaagggtttcgacttcaccttgatggtggcgggcgaatcaggactgggcaagtccaccctcgtcaattcgctgttcctgactgatctctaccgcgatcgcaaattgttgggcgcggaggaacggatcatgcagactgtggagattaccaaacatgccgtggacatcgaggagaaaggagtgcggctgcggctgaccatcgtggatacccctggtttcggtgacgcggtgaacaatactgagtgttggaagcccgtggcagagtacatcgaccaacagtttgagcagtacttcagagacgaatcgggcctcaacaggaagaatattcaggataatcgcgtgcattgctgtctgtacttcatctccccgttcggacacggtctgaggcctctggatgtggaattcatgaaggcacttcaccagagagtcaatatcgtgccaatcctcgctaaggccgacactctgacgcccccagaagtcgaccacaagaagcgcaagatccgggaagaaatagagcatttcggaatcaagatttatcaatttccggactgcgattcagacgaggatgaagatttcaagctgcaggatcaagccttgaaggagtccattcctttcgcagtgatcgggagcaatacggtcgtggaagccaggggacgccgggtgagaggacggctgtacccgtggggaatcgtcgaagtggagaaccctggccattgcgacttcgtgaagctgagaactatgctcgtccgcacccacatgcaggacttgaaggacgtcactcgcgagacgcactacgaaaactaccgggctcagtgcatccagagcatgactcgcctggtggtgaaggagcgcaaccgcaacaagctcacccgcgaatccggcacggactttccgatcccggcggtcccaccgggaacggatccggaaaccgaaaagctgatcagagagaaggacgaggagctgcggagaatgcaggaaatgctgcacaagatccagaagcagatgaaggagaactac

SEQ ID NO: 32542 - DNA, 1434 bp, synthetic construct
  misc_feature 1..1434: note = Description of Artificial Sequence: Synthetic coding sequence
  source 1..1434: mol_type = other DNA
atggacaggtcactcggttggcagggcaactccgtcccggaggatcgcacggaagccggtatcaagcgcttcctggaagataccaccgacgacggagaactttcaaagttcgtgaaagatttctcgggcaacgccagctgccacccacctgaagcaaagacttgggcctcccgcccacaagtgccggaaccgcgccctcaggcccctgacctgtacgacgacgatttggaattccggccgccgagccggccgcagagttcggacaaccaacagtacttttgtgcaccggcccctctgtcgccgtccgcacggccgagaagcccgtggggaaaactggacccgtacgactcatcggaagatgataaggaatacgtgggtttcgcaactctccctaatcaggtccaccggaaaagcgtgaagaagggattcgacttcaccctcatggtggcaggcgaatccggtcttggaaagtcaactctggtgaactcgctgtttctgacggatttgtacagggaccgcaagctgctgggcgcggaggagcggatcatgcagaccgtggagattaccaagcatgctgtcgatatcgaagagaaaggagtgagactgcggctgaccatcgtggatacgccaggctttggtgacgcggttaacaatactgaatgctggaagccagtggccgaatacatcgatcagcagttcgagcagtacttccgggacgagtcaggcctgaatcggaagaacattcaagacaaccgagtgcactgctgcctctacttcatctcaccctttgggcatggactcagaccgctggacgtggagttcatgaaagcattgcatcagagagtcaatatcgtgcccatcctcgcgaaagccgacactctgactcctccggaagtggatcacaaaaagcggaaaattcgggaagaaattgagcacttcggtatcaaaatctaccagttccctgattgcgactctgatgaggacgaggacttcaagctccaagatcaagcgctcaaggaatcgatcccgtttgctgttatcggttcgaacaccgttgtggaagcacgcggccggcgcgtcagaggacggctgtacccatggggcatcgtcgaggtcgagaacccaggacactgcgacttcgtgaagttgcgcactatgctggtgcggacccacatgcaggacctcaaggacgtcaccagggaaactcactacgagaattaccgcgcccagtgcatccaatcaatgacccggctggtcgtgaaagagcggaaccggaacaaactgaccagggagagcgggacggactttcctatccctgccgttccacctggtaccgatccagaaacggaaaaactcattcgggagaaggacgaagagctgcggagaatgcaggaaatgctgcacaagatccaaaagcagatgaaggagaactac

SEQ ID NO: 32543 - DNA, 1434 bp, synthetic construct
  misc_feature 1..1434: note = Description of Artificial Sequence: Synthetic coding sequence
  source 1..1434: mol_type = other DNA
atggatcggagcctgggatggcaaggtaactcggtccccgaggatagaactgaagcgggaatcaagcgttttctggaagatacgactgacgatggtgaactgtccaaattcgttaaggatttttcgggaaatgcgtcgtgtcatcccccagaagctaagacctgggctagccggccccaggtgccagaaccgcgtccacaagcaccagatctttacgatgacgatcttgagtttagacctccttcccgccctcaatcatccgataatcagcagtacttttgcgcacctgctccactttcaccatccgcccgccctaggtcgccctggggtaaacttgatccatacgacagctccgaggacgataaagagtacgtcggatttgctaccctgccgaaccaggtccatcgaaagtctgtgaagaagggatttgattttaccctcatggtggccggagaatcaggccttgggaagtccaccttggtgaattccctctttttgacggacttgtacagagatagaaaactcctgggtgccgaagaaagaattatgcaaaccgtcgaaattaccaagcacgcagtggatatcgaggaaaaaggagtccgcctgcgtcttactatagtcgacactcctggatttggtgatgcagtcaacaataccgaatgttggaagcccgtcgccgagtacattgaccagcaattcgagcaatactttcgagatgaatcaggtcttaacaggaagaatattcaagataaccgagtgcattgttgcttgtacttcatctccccttttgggcacggacttcgccccctcgatgtggaattcatgaaggcactgcatcagcgggtgaacatcgtgccgatcctcgcaaaggcagatactcttactccacctgaagtcgatcacaaaaagagaaagatacgtgaagagattgagcattttggaatcaagatataccagtttcctgactgcgacagcgacgaggatgaagatttcaagctgcaggatcaggcgcttaaagagtccatacccttcgcagtgattggatcaaacaccgtggtcgaagcaagaggccgtcgggtgagaggtcgcctctatccctggggcattgtggaggtcgaaaaccccggtcattgtgactttgtgaagctcaggactatgttggtgcgaactcacatgcaggatctcaaggatgtgactagagaaacccattatgagaactaccgggcacaatgtatccagtcaatgactagactcgtcgttaaagaaaggaatcggaataagctgacgcgagagagcggcactgatttcccaattcccgcagtgcctcctggaactgatcctgaaactgagaaactcattcgggaaaaggatgaagaacttcgtcggatgcaggaaatgttgcataagatccaaaagcagatgaaagagaactac

SEQ ID NO: 32544 - DNA, 1434 bp, synthetic construct
  misc_feature 1..1434: note = Description of Artificial Sequence: Synthetic coding sequence
  source 1..1434: mol_type = other DNA
atggatagatctctgggttggcagggcaacagtgtccccgaggaccgtaccgaggcaggtatcaagcgctttcttgaggacaccaccgatgatggcgagctttccaagttcgtcaaggatttttccggcaacgcctcctgtcaccccccggaagctaagacctgggcctctcgcccccaggtgcccgaaccccgaccgcaagcccccgacctgtacgatgacgatcttgagttccgcccgccatcccgtccgcagtcttcggacaaccagcagtatttctgcgcgccggcccccttgtctccctcggcccgcccacgttcgccgtggggaaagttggatccttacgatagctccgaggacgataaggaatacgtcggtttcgcgactcttccgaaccaggtccacaggaaatccgtcaagaagggtttcgatttcaccctgatggtggccggcgaatccggactcggcaagagtacgctggttaacagccttttcctgacggatttgtaccgggaccgcaagctgctgggcgcggaggagcgaatcatgcaaaccgtcgaaataacgaagcatgctgttgatatcgaagagaagggtgtccgtttgaggctgaccatagtggatacaccgggttttggtgacgccgtgaacaataccgagtgttggaagcctgttgccgagtacatagaccagcagtttgaacagtacttccgcgatgaaagtggtctcaaccgaaagaacattcaggacaaccgtgtccactgctgcttgtacttcatcagcccgttcggtcacggtctcaggccccttgatgtagagttcatgaaggctcttcaccagcgcgtgaacatcgtgccgatcctggccaaggccgacactctcactccgccggaagtggaccacaagaagcgcaaaatccgcgaggaaatcgaacacttcggtatcaagatttatcagttcccggattgcgattccgatgaagacgaggactttaagctacaggatcaggcgctcaaagagtctatcccctttgctgttatcggaagcaacaccgtggtggaggctcgtggccggcgagtgcgcggcaggctctacccctggggtatcgtggaggtggagaaccccggccattgcgattttgtcaagctgcgcaccatgctcgtccgtacacatatgcaggacctgaaggacgttacccgcgaaacccattatgaaaactatcgtgcccagtgcattcagtctatgacgcgcttggtggttaaggagagaaaccggaacaagttgacccgggagtctggaacagatttccccatcccagcagtccctcccggtactgaccctgagaccgaaaagctgatccgtgaaaaggacgaggagctccgccgtatgcaagagatgctccataaaatccagaagcagatgaaggagaactat

SEQ ID NO: 32545 - DNA, 1434 bp, synthetic construct
  misc_feature 1..1434: note = Description of Artificial Sequence: Synthetic coding sequence
  source 1..1434: mol_type = other DNA
atggacagatctctgggatggcaagggaactcagtgcccgaagatagaacggaggccggtatcaagcgcttcctggaggacaccactgatgacggtgaactcagtaagttcgtgaaggatttttctggcaacgcttcctgccacccgcccgaagctaaaacatgggctagccgaccccaggtacccgagcctcggcctcaggccccggatctgtacgacgacgatctggagtttcgacccccctctaggccacagagttccgacaatcagcagtacttctgtgcccccgcccctttgagcccgagtgcgcgcccacgatccccttggggcaagcttgatccgtatgactcttctgaggatgacaaggagtacgtcggcttcgccacgctgccaaaccaggtgcatcgaaaatcagtgaaaaaaggcttcgacttcaccctcatggtggctggggaaagcgggctgggtaaatcaaccctcgtgaattctctgtttctgactgacctttacagggatcgaaagctgctgggggccgaggagcgaatcatgcagactgtggaaattactaagcacgctgtggatattgaagaaaagggagtacggctgaggctcacaatcgtggacacaccgggcttcggcgacgccgtcaacaacactgagtgctggaaacccgtcgcagaatacattgaccagcagtttgaacaatacttcagagacgaaagcgggcttaataggaagaatatccaggataatcgggttcattgttgcctctactttataagtccgtttggccacgggctcagacctctggacgtagaatttatgaaagcactgcaccagcgcgtcaacatcgttccaatactggcaaaggcggatacacttacaccacccgaggttgaccacaagaagcggaagatacgcgaggagattgaacatttcgggattaagatctaccagttcccagactgtgattccgatgaagatgaggactttaaactgcaggaccaggcgctgaaggagtccatccccttcgcagttatagggtcaaataccgttgtggaggcgcgggggcggagagtcagaggaaggctgtatccatggggcattgtggaagtggaaaaccccggccactgcgacttcgtgaagctccggaccatgttggtcaggacccacatgcaggaccttaaggacgtcacccgggagacgcattatgaaaactaccgcgcgcagtgcattcagtccatgacgcggctcgtggtgaaagagagaaacagaaataaattgacccgagagagtggcactgactttccaatacctgccgttccacctgggactgacccagaaaccgagaaactcattagggagaaagatgaggagttgcgcagaatgcaggagatgcttcataaaatccagaagcagatgaaggagaattat

SEQ ID NO: 32546 - DNA, 1434 bp, synthetic construct
  misc_feature 1..1434: note = Description of Artificial Sequence: Synthetic coding sequence
  source 1..1434: mol_type = other DNA
atggatagaagcctgggatggcagggaaactccgtccctgaagatagaactgaagccggaatcaaacgcttcctcgaggataccacggacgatggcgagctttccaagtttgtgaaggatttttcgggaaacgcaagctgtcatcctcctgaggcaaagacctgggcctcccggcctcaagtgccagaaccgaggcctcaggcaccagatctgtacgatgatgacctggaatttcggccaccttcgaggccacaatcgtcagataaccaacaatacttttgtgctccagcacctctcagcccctcggcaagacctaggagcccctgggggaagctggacccatacgattcctcggaagatgataaggagtacgtggggtttgcaactttgcctaatcaagtccacaggaagtcggtgaagaaaggatttgattttactcttatggtggcaggagagtcgggactcggcaagagcactcttgtgaattcactgttcctgaccgacttgtacagggatcgcaagctgctgggagcggaagaacggattatgcaaaccgtcgaaatcactaaacatgcagtagacattgaggagaagggcgtgcgacttaggctcactatcgtggacaccccaggatttggagacgcggtgaacaacacggagtgttggaaacctgttgccgaatacattgaccagcagttcgaacaatactttcgagatgaatcaggactcaatcgcaagaacatccaagataaccgagtgcactgctgtctttacttcataagcccttttggccatggactgcgccctctcgatgtggaattcatgaaagcactgcatcaaagagtgaatattgtgcccatccttgcaaaggctgatacccttacccctccagaagtggaccataagaagagaaagattagagaggaaattgaacacttcggaattaagatctaccagttccctgattgtgattcggacgaagatgaggatttcaagctgcaggatcaagccctgaaagaatccatccctttcgcggtgataggatcgaataccgtggtcgaagcccggggaagaagagtgcgggggcggctttatccttggggaatagtggaagtggagaacccgggacattgtgattttgtgaaacttcgcaccatgctggtgagaactcacatgcaggatctgaaggatgtgacccgagaaacccactacgaaaactaccgcgcacaatgcatccagtccatgaccagactggtggtgaaggaaaggaaccgcaataagctcacccgtgagagcgggacggatttcccaattccagcagtcccacctggaaccgaccccgaaaccgagaagctgattagagaaaaggatgaggagctgagaagaatgcaagaaatgctccataagattcaaaaacaaatgaaagaaaactac

SEQ ID NO: 32547 - DNA, 1434 bp, synthetic construct
  misc_feature 1..1434: note = Description of Artificial Sequence: Synthetic coding sequence
  source 1..1434: mol_type = other DNA
atggatagaagcctcggatggcagggaaacagcgttccggaggacagaactgaggcagggatcaagcgattcctggaggacaccactgatgacggagaattgagcaagttcgtcaaggacttttccggtaacgccagctgccacccgcctgaggccaaaacctgggcctcgcgtccccaggtcccagagcctcgcccacaagcgccggacctctacgatgatgatttggagttccggccgccaagccgcccgcaatcgtccgacaaccagcagtacttttgcgcacccgcccccctgtcaccttcggcacgcccaaggtccccgtggggcaagctggacccatacgactctagtgaagatgataaggaatacgtcggatttgccacccttcctaatcaggtccaccggaaaagcgtgaagaaaggattcgatttcactttgatggtggccggagagagcggtcttggcaagtcgacgttggtgaattctcttttccttaccgacctctaccgggaccgcaagttgctcggagcagaagaacgtatcatgcagactgtggaaatcactaagcacgccgtggacattgaggaaaaaggcgtgcgcctgcggctgaccatcgtcgacactccgggcttcggcgatgcggtgaacaacaccgagtgttggaagccggtggcggaatacatcgatcaacaattcgagcaatactttagggatgagagcggtctgaaccgcaaaaacattcaggacaaccgggtgcattgttgcctgtatttcatcagccctttcggacatggtctgcgcccactggacgtggagttcatgaaagcccttcatcagcgagtcaatatagtcccaattctcgctaaggctgacactctcacgcctccggaggtcgaccacaaaaagcggaagatacgggaggaaatcgaacactttggaataaagatctaccagttcccggactgcgattcagatgaggacgaggactttaagctgcaagaccaggccctcaaagaatcaattccgttcgcggtaatcgggtccaacactgttgtggaggcccgcgggagacgggtgcgcggccgcctgtacccctggggaatcgttgaagtggaaaatccgggacactgcgatttcgtgaagctccggaccatgctcgtgcggactcatatgcaagaccttaaggatgtcacccgagaaacccactatgaaaactaccgggcacagtgcattcagagcatgactcggctcgttgtcaaggagagaaatagaaacaaactgacccgcgaatcggggacggacttccctatccctgctgtgccgccgggaaccgatcccgagacggaaaagctgatccgggaaaaagacgaagagcttcggcggatgcaagagatgttgcacaaaatccagaagcaaatgaaggaaaactac

SEQ ID NO: 32548 - DNA, 1434 bp, synthetic construct
  misc_feature 1..1434: note = Description of Artificial Sequence: Synthetic coding sequence
  source 1..1434: mol_type = other DNA
atggatcggtcgcttgggtggcaaggaaatagcgtgcctgaagatcggactgaggccggtattaagagatttcttgaagatactactgacgacggagaactctcgaaatttgtgaaggatttttcgggaaacgcaagctgtcatcctcccgaagccaagacgtgggcatcacgccctcaagtgcccgagcctagaccacaggcaccagacctttacgacgacgaccttgagtttcgtccaccttcgcgaccacagtcctctgataaccaacagtacttttgcgcaccagcccctctttcaccatcggcaaggcctcggtcgccctggggaaagctggatccttacgactcgtcggaagatgacaaggaatacgtggggtttgcaacccttcccaaccaagtccatcggaaaagcgtcaagaagggattcgatttcacccttatggtggcaggagaatccggacttggaaagtcgacccttgtgaattcgctctttttgactgacctttaccgggataggaagctcctgggagcggaagagagaatcatgcaaaccgttgagatcactaaacacgcagtcgatatcgaagagaagggagtgagactgcgcctcaccattgtcgatacccctggatttggtgacgcagtgaacaataccgaatgctggaaacctgtggcagaatacatcgatcaacaatttgaacaatacttccgcgatgaaagcggtctgaaccgtaagaacattcaggacaatagagtgcactgttgtctttacttcattagtccttttggtcatggacttcggccactcgatgtcgagtttatgaaggcgctgcatcaaagggtcaacattgtgcctatactggcaaaagccgacactctcaccccacctgaagtcgatcacaaaaaacggaagattcgggaggaaattgaacattttggtatcaagatctaccagttccctgactgtgattctgatgaggatgaagatttcaagctccaagaccaggcactgaaggaatccattcccttcgcagtgattggatcaaacacggtggtggaggctcgtgggcgcagagtgcgcggcagactttatccctggggcatcgtggaagtggagaatccgggtcattgcgactttgtgaagctgcggaccatgctggtgcgaacgcatatgcaggacctcaaagacgtgactagggagactcactacgaaaactacagagcccaatgcattcaatcgatgacgcggcttgtggtgaaggaaagaaaccgcaacaaattgaccagggagtcgggtaccgattttccaatcccagcagtgcctcctggaaccgatcctgagactgaaaagctgattcgggaaaaagatgaggaacttcggcggatgcaagagatgctccacaagatacaaaaacaaatgaaagaaaactat

SEQ ID NO: 32549 - DNA, 1434 bp, synthetic construct
  misc_feature 1..1434: note = Description of Artificial Sequence: Synthetic coding sequence
  source 1..1434: mol_type = other DNA
atggatagatcgctgggatggcaaggaaacagtgttcctgaggaccgcaccgaagcaggaatcaaacggtttctggaggataccactgatgacggtgagttgtcaaagtttgtgaaagacttcagcggaaatgcatcctgccacccccctgaagcaaagacctgggcttcccgtccacaagtgcccgaacctcggcctcaagctccggatctttacgacgacgatctggaatttcggcctccttcacggccccaaagctcggacaaccaacagtacttctgcgcacccgcaccactgtcaccatccgccagaccaaggagcccctggggtaagctcgacccatacgattcctctgaggatgataaagaatacgtggggtttgccacccttccaaaccaggtccatcgcaagtcggtgaagaaaggctttgatttcaccctcatggtggcaggcgagtcgggactgggtaagtctactctcgtgaatagcctgtttctgactgatctgtacagggatcgtaagctcctcggagcggaagagcgaattatgcagactgtggaaattaccaagcatgcagtcgatattgaagaaaagggtgtgagactgaggctgacgattgtggatactcccggtttcggagatgcggtgaataacaccgaatgttggaagccagtggcggaatacatagatcagcaatttgagcagtatttcagggatgaaagcgggcttaatagaaagaacatccaagacaacagagttcactgttgtctttacttcatcagtccttttggtcatgggctgcgtcctctggatgtcgagtttatgaaagcgctccatcagagagtcaatatagttcccattcttgcaaaggcagacacgctcaccccaccggaggtggatcataagaagagaaagatccgggaggaaatcgagcattttggtatcaagatctaccagtttccagactgtgattccgatgaggacgaggacttcaagctgcaagatcaagctcttaaggaaagcataccgttcgccgtcattggaagtaatacggtcgtggaagcacgcggcagacgagtgcgcggccgcctgtacccttggggcattgtggaagtagagaatccaggacattgcgattttgtgaaactccgcaccatgctcgtcagaacgcatatgcaagatcttaaagacgtgactagggaaactcactacgaaaactaccgcgcccaatgtatacagtctatgactcggctcgtggttaaggagcggaaccggaacaaacttactagagaatcgggtaccgacttccctattcctgccgtgcctccgggaaccgaccccgaaactgaaaaacttattagggaaaaagatgaagaacttaggcgaatgcaggaaatgctccacaagattcagaagcaaatgaaggagaactat

SEQ ID NO: 32550 - DNA, 1434 bp, synthetic construct
  misc_feature 1..1434: note = Description of Artificial Sequence: Synthetic coding sequence
  source 1..1434: mol_type = other DNA
atggatcgctctttgggctggcagggcaactctgtccctgaagacagaacagaggccggcataaagagattcctggaagataccactgacgatggagagctgagtaagtttgtaaaggactttagcggaaacgcatcatgtcaccctccggaggctaaaacctgggcaagcaggcctcaggtgcctgagccccgcccacaagcacccgatctctatgacgacgaccttgagtttagaccaccatctcgcccgcagagttccgacaaccagcagtatttttgcgctccagcacccctctccccaagcgcacgccctcgctccccatggggaaaactggacccctatgatagctctgaagatgacaaggaatatgttggcttcgccacactcccaaatcaagtgcataggaaatctgtcaagaagggcttcgacttcaccctgatggtagcaggagagagcggcctgggcaagtctacgctcgtgaattctttgttcctgaccgacctctatagggaccgcaaactcttgggtgctgaagagcgcatcatgcagacagtagaaatcactaagcacgctgtcgatatcgaagaaaagggagtaagacttagactgacaattgtcgacacccccggcttcggagatgctgtgaacaatactgaatgttggaagcctgtagctgaatatattgaccagcaatttgagcagtatttcagagacgagtcaggactgaaccgcaagaacatacaggataaccgcgttcactgttgtctctacttcatttcacctttcggccacggactcaggcctttggatgtggagttcatgaaggctctccaccagcgcgtcaatattgtgccgatcctcgccaaggcggacaccctcaccccacccgaagtcgaccataaaaagaggaagatcagggaggagatcgagcattttggcattaagatctatcagttccctgactgtgactcagacgaggatgaggacttcaagttgcaagatcaggcgctcaaggagtccatcccatttgcagttatcggaagcaacactgtagttgaagccaggggcagacgcgtccgcggcaggttgtatccatggggtatagtggaggtcgagaatccgggccattgcgacttcgtgaaacttagaacaatgcttgttaggacccatatgcaagacttgaaggacgtcaccagggaaactcactacgaaaattatagggcccaatgcatccaatccatgactcgcctggttgtcaaggagcgcaaccgcaacaaactgactagagaatctggcacagacttcccaattcccgccgttccgcctggaacagatccagagacagagaagctgatcagggagaaggacgaagagcttagaaggatgcaggagatgctgcacaaaattcagaagcagatgaaggagaactac

SEQ ID NO: 32551 - DNA, 1434 bp, synthetic construct
  misc_feature 1..1434: note = Description of Artificial Sequence: Synthetic coding sequence
  source 1..1434: mol_type = other DNA
atggatagaagcctcggctggcaaggtaactccgtccctgaggacaggacagaagcaggtatcaaacggtttctcgaagacacaactgacgatggagaattaagcaagttcgtcaaggactttagcggcaatgcctcttgccacccgcctgaggctaagacatgggcatcacggccacaggtgcctgaaccaaggccccaggcccctgacctctatgatgatgacctggagttccggccacctagtaggccacaatcctctgacaaccaacagtacttttgcgcaccagcacctcttagtccaagtgccaggccaaggagcccatgggggaaattagacccttacgacagttctgaagatgataaagagtatgtgggtttcgcaacattgccgaatcaggtgcatcggaagagtgttaagaaaggatttgacttcacattaatggtggcaggggagagcggcctgggaaaaagtactttggttaattcactgttccttactgacctgtatagggatagaaagctgctgggagccgaggagagaatcatgcagaccgtggaaatcacgaaacacgccgttgacatcgaagagaagggcgtgagacttcgcctcacaattgttgatacacctggcttcggcgacgccgtgaacaataccgagtgctggaagcctgtagcagagtacatcgaccaacagttcgaacagtactttcgggatgaatccggcctcaaccggaagaacatacaggacaatagggtgcactgctgcttgtatttcatctccccttttggtcacggtctgcgtcctctggacgttgaattcatgaaggctcttcaccagcgggtgaatatagtgccgattttagctaaggctgatacgctgacgccgcctgaagttgatcacaaaaaaaggaagatccgggaagagattgagcactttgggataaagatctatcagtttcctgattgtgactctgacgaggatgaggacttcaaactgcaggatcaagcactgaaagagtccattccgttcgctgtgattggctcaaatacggtagtggaggctcggggccgtcgagtgcgcggtaggctgtatccttggggaattgttgaagtggaaaaccccgggcattgtgacttcgttaaactgaggaccatgttagtgcgcactcacatgcaagaccttaaagacgtcactcgtgaaacccactacgagaactacagggctcagtgcatacagagtatgacccggctcgtcgtgaaggaacggaaccgcaacaaattgaccagggaaagcggcacagattttcctataccggccgtcccacctggcaccgaccccgaaaccgaaaaacttatcagggagaaagatgaagagctcagaaggatgcaagaaatgctccataaaatccagaagcagatgaaggagaactat

SEQ ID NO: 32552 - DNA, 1434 bp, synthetic construct
  misc_feature 1..1434: note = Description of Artificial Sequence: Synthetic coding sequence
  source 1..1434: mol_type = other DNA
atggatcgtagtcttggatggcaaggaaatagtgttccagaagatagaactgaagcagggataaaacgtttccttgaagacacaacagatgatggtgaattatctaaatttgttaaagacttttccggtaatgcatcatgtcatcctccagaagctaaaacttgggcctctagaccacaagttcctgaaccaagaccacaagctccagatctttatgatgatgacttagaatttagaccaccatcacgaccacaatcaagtgataatcaacagtatttttgtgcacctgcaccactttcaccaagtgctagacctcgaagtccatggggtaaacttgatccatatgattctagtgaggatgataaagaatatgttggattcgctactttaccaaatcaagtacataggaaaagtgttaaaaaaggatttgatttcacattaatggttgcaggagaatcaggacttggtaagagtactcttgttaatagtttatttcttactgatctttatagagatagaaaattgttaggtgctgaagaaagaattatgcaaacagttgaaataactaaacatgctgttgatattgaagaaaagggtgttagattaagattgacaattgttgatacaccaggatttggagatgcagttaataatactgaatgttggaagcctgttgcagaatatatagatcaacaattcgaacaatattttagagacgaatcaggtttaaacaggaaaaatattcaagataatagagttcattgttgtttatattttatttcaccttttggtcatggacttagaccattagatgttgaatttatgaaggctttacatcaacgtgttaatattgttccaattcttgctaaagctgatactttaactccacctgaagtggatcataagaagagaaaaattagagaagaaatagaacatttcggaattaaaatttatcaatttccagattgtgattcagatgaagatgaagatttcaaattgcaagatcaagcattaaaggaatctattccatttgcagttattggttcaaatactgttgttgaagctagagggagaagagttcgtggaagattgtatccatggggtattgtcgaagtagaaaatccaggacattgcgattttgttaaacttagaactatgttagttagaactcatatgcaagatttaaaagatgttacacgtgaaacacattacgaaaattatagagcacaatgtattcaatctatgactagattagtggtaaaagaaagaaatagaaataaattaacaagagaatcaggaacagattttccaattccagctgttccaccaggaacagatccagagactgaaaagttaattcgtgaaaaagatgaagaacttagaagaatgcaagaaatgttacataaaattcaaaaacagatgaaagaaaattac

SEQ ID NO: 32553 - DNA, 1434 bp, synthetic construct
  misc_feature 1..1434: note = Description of Artificial Sequence: Synthetic coding sequence
  source 1..1434: mol_type = other DNA
atggaccggtcactgggttggcaaggaaactcggtgccagaagatagaactgaagcagggattaagaggttcttggaagataccaccgacgacggtgaactgtcgaaatttgtgaaggactttagcggaaatgcaagctgtcaccctccagaggcgaaaacgtgggcaagcagacctcaagtgccagaaccccgcccccaagcgcctgacctctacgacgacgatctggaattccgccctccatcccgcccgcagtcatccgataatcaacagtacttttgtgcgccggcgccactttccccctcagcacgtccgcgctcgccctggggtaagctggatccatacgattcgagcgaagatgacaaggaatacgtgggttttgcgacccttcccaaccaggtccaccgcaagagcgtgaagaaagggttcgatttcactctgatggtggcaggcgagtcgggactcgggaaatcgacccttgtgaacagtcttttcctcaccgatctgtacagggatcgcaagctcttgggtgcggaggagaggattatgcaaaccgtcgaaattaccaagcatgcagtcgatattgaagaaaagggagtgaggctgcgacttaccatcgtggatacccctggttttggagatgcggtgaacaacactgaatgctggaagccagtcgctgaatacatagatcagcagtttgagcaatacttccgtgacgaatcagggctgaacaggaagaatatacaggacaacagagtgcactgttgtctctacttcatctccccatttgggcatggactccggccgctggacgtcgaattcatgaaggctcttcaccaacgggtcaacatcgtccctatactggccaaagccgatactctgacccctcctgaagtcgatcacaaaaagcggaagatccgagaggagattgagcatttcggcattaagatttatcagttccccgattgtgatagcgacgaggatgaggactttaagctgcaagatcaggctcttaaggaatccatcccatttgcagtgataggctccaacaccgtggttgaggcccgcggaaggcgagttagaggacgtctctacccatggggtatcgtcgaagtggagaatccgggccactgtgactttgtgaaactgcgcactatgctggtcagaacccatatgcaagacctgaaggacgtcactcgcgaaacccactacgagaactatagggcacagtgtattcaaagcatgacgcggcttgtggtgaaggagcggaatcgtaataagctgacccgggaaagcggaactgattttcctataccagcagtgcccccaggaaccgacccggaaaccgaaaagctgattagagaaaaagacgaagaactccggaggatgcaagaaatgctccacaagattcagaaacaaatgaaggaaaactac

SEQ ID NO: 32554 - DNA, 1434 bp, synthetic construct
  misc_feature 1..1434: note = Description of Artificial Sequence: Synthetic coding sequence
  source 1..1434: mol_type = other DNA
atggatcgaagcctaggttggcagggcaattccgttccagaagataggaccgaagccggtattaaacggttcctggaggatacaactgacgacggggagttgtcaaaattcgtgaaagatttctctgggaacgctagttgccaccccccagaagctaaaacctgggctagccggccccaggttcctgagcctcgaccccaggcgccagatttgtatgacgatgatctcgaattccggccaccatcacgtccacagtccagcgataatcagcaatacttctgtgccccggccccactttctccatcagcacgcccccgttcaccttggggtaagcttgacccttacgacagctctgaggatgacaaggagtacgtcggattcgctacactgcccaatcaggtccaccgaaaaagcgttaagaaagggtttgatttcaccctgatggttgcgggtgagtctggcctcggcaagtcaaccttggttaactccctgttcctcactgacctataccgggaccgcaaactgcttggggccgaggagcgcattatgcagactgtcgagataaccaagcacgcagttgacatcgaggaaaagggggtccgtctgcgactgacaattgtggatactcccggattcggagatgccgtgaataacaccgagtgttggaagcctgttgcggaatatatcgatcagcagttcgaacaatattttagggacgaaagtggcctcaataggaaaaacatacaagataatcgcgttcattgctgcctctattttatatccccattcgggcacggtctccgcccattggatgttgaatttatgaaggcactccaccagagagtcaatatcgtgcctatcttggctaaagccgatacacttacaccacctgaggtcgatcacaagaagcgcaagattagggaggagatcgaacacttcggcattaaaatttaccaattccctgattgcgatagtgacgaggacgaagactttaagcttcaggaccaggccctgaaagagtccatacctttcgcagtgatagggtccaacactgtcgtggaggcacgcggccggcgcgtacgaggacgcctctacccctggggcatagtcgaagtggagaatcccggccactgtgatttcgtcaaactgcggacaatgttggtccggacccacatgcaggacctgaaggacgtgactcgcgagacacactacgagaattatcgcgcgcaatgcatacagtctatgacccgccttgtggttaaggagcgtaaccggaacaaattgacccgggagtcaggcacagactttcccattccggcagtcccacccggaactgatcccgagactgagaaactcatacgcgaaaaggatgaagagctgcgccgaatgcaggagatgcttcacaagatccaaaagcagatgaaagagaactat

SEQ ID NO: 32555 - DNA, 1434 bp, synthetic construct
  misc_feature 1..1434: note = Description of Artificial Sequence: Synthetic coding sequence
  source 1..1434: mol_type = other DNA
atggaccggagtctggggtggcagggcaacagtgttcctgaagatcggaccgaggctgggataaaacgattcctagaagacacaacagacgatggcgaactgtcaaagtttgtgaaggatttttcgggaaatgcctcctgccaccccccagaggccaaaacctgggcaagccggccacaagtgccagagccacgccctcaggcgccagacctgtacgacgacgacctggagttccgaccaccttccagaccccaatcttctgacaaccaacagtatttttgcgcccccgctcccctgtcaccctcggccagaccaagatcaccttggggcaaacttgacccatacgatagttctgaagacgataaggaatatgtagggtttgcaaccctgccaaaccaggtgcatcggaagagcgtgaaaaaggggttcgattttactcttatggtggcaggagagagcgggctgggcaagtccaccctggtgaactcactgttccttaccgatctctaccgagaccgtaaactgcttggtgccgaagaacgcataatgcagaccgttgagataacaaagcatgccgttgatattgaagagaaaggcgttaggctcaggttgacaattgtggatactcccggattcggcgatgcggttaataacacagagtgctggaagcctgtggctgaatatatcgatcaacagtttgaacagtacttccgagacgaatcaggcctgaatcgcaagaacattcaggacaacagagtccactgttgtctctacttcatctcccctttcggtcacggcctcagaccacttgacgtagagttcatgaaagccttgcaccaaagagtgaacattgtgcccattcttgctaaagccgacactcttacgcctcccgaggtggatcacaaaaaacgtaagatcagagaggaaatcgagcacttcggcattaaaatttatcaattcccggactgcgattccgacgaagacgaagatttcaagctgcaggaccaggccttaaaagaatctatccctttcgcagtaatcggctccaatacggtcgttgaagctcgcgggcgaagggtgcgtggtaggctctacccatggggaatcgtggaggttgaaaatccaggtcactgcgactttgtaaagctgcggactatgctggtgcgtacccatatgcaggaccttaaggatgttactagggagacacattacgagaactacagggcacagtgtatccagagcatgactaggctggtggttaaggagagaaacagaaataagttaacccgcgagtccgggacggacttcccaattcccgcagtgccgcccgggacggaccccgaaacggagaaactgatcagggagaaggatgaggaattgagacgaatgcaggagatgctgcataaaatccagaagcaaatgaaggagaactat

SEQ ID NO: 32556 - DNA, 1434 bp, synthetic construct
  misc_feature 1..1434: note = Description of Artificial Sequence: Synthetic coding sequence
  source 1..1434: mol_type = other DNA
atggaccgctctctcggttggcagggaaacagtgtgcctgaggacaggaccgaggctggcataaagcgctttctggaggatacaaccgatgatggtgaactgtccaagttcgtgaaggacttttcaggaaatgcctcttgtcatccgccggaggccaaaacatgggccagtagaccgcaggttccagaaccaaggccacaagctccagacctttatgatgatgacctggagttccgccccccttcacgcccccagagcagcgacaaccagcagtatttttgtgccccggcccctctgtcgccgagtgccagacccagatccccctggggaaagctggacccttacgactcttcagaagacgacaaggagtatgtgggttttgctacgctgccaaatcaggtgcaccggaaatccgtgaagaaaggttttgatttcaccttaatggttgcgggggagtctgggctaggcaagagcacattggtgaacagcttattcctgacagatctgtatcgtgataggaagttgctgggtgccgaagaaaggatcatgcagaccgttgagataactaaacacgccgtagacatcgaggagaaaggggtccgcctgaggttaacgatagtggacaccccgggattcggtgatgctgtgaacaataccgagtgttggaagcccgttgcagagtatatagatcagcagttcgagcagtactttagggacgagagcggtctcaaccgcaaaaatatccaggataatcgggtccactgttgcctgtactttatctcgcccttcggccacggcttgagaccacttgacgtggaattcatgaaggctctgcaccagagggttaatatagttcccatactggccaaggcagacaccctgacacctcccgaagtggaccacaagaagaggaagattcgcgaggaaattgaacacttcggtattaaaatctaccaattccctgactgtgattcagatgaggatgaggattttaagctgcaggaccaggccttgaaggaaagcattccgtttgccgtcatcggaagcaataccgtcgtggaggccagagggagacgggtcagaggtcgtctatatccttggggtatcgtggaagttgagaaccctgggcactgtgatttcgtgaagctaaggacaatgctggtacggacccacatgcaagacctgaaggacgttactcgcgaaacccactacgaaaattatagagcccagtgcattcagtctatgacgcgactggtggtaaaagaacggaatcgaaacaagctaacacgagaaagtggcactgatttcccaattccagctgtgccccctggaacagacccagaaaccgagaagctcatccgcgagaaagacgaagagttaaggaggatgcaggaaatgttacataaaatccagaagcagatgaaagaaaattac

SEQ ID NO: 32557 - DNA, 1434 bp, synthetic construct
  misc_feature 1..1434: note = Description of Artificial Sequence: Synthetic coding sequence
  source 1..1434: mol_type = other DNA
atggataggtcactgggatggcaaggcaactcagtgccagaagatcggaccgaagcgggaatcaagcggtttttggaggacactaccgacgatggagaactgtcgaaattcgtgaaagacttctcgggcaatgcaagctgtcacccgcccgaagcaaagacttgggcgtcccggccgcaggtgccggaaccgaggccgcaagctccggacctgtacgatgacgatctggaatttaggccgccttccagaccgcaaagttcggacaaccaacaatacttttgcgcccctgccccgctctccccgtccgctagacctagatccccgtgggggaagctggatccatatgactcatccgaggatgataaggagtacgtgggtttcgccacgcttccaaaccaggtgcatcggaaatctgtcaaaaaagggttcgacttcaccctgatggtggctggagagagcggactgggaaagagcactttggtgaattcactcttcctcaccgacctttacagagataggaaactgctcggcgcagaggaacgaatcatgcagactgtcgagatcaccaaacatgcagtggacatagaagaaaagggcgtgcgcctccggctgaccatcgtcgatacgccgggattcggcgacgcggtcaataacaccgaatgttggaagccggtggctgaatacatcgaccagcaattcgaacaatacttcagggacgaatcgggtcttaaccgcaagaatatccaggacaaccgagtccactgctgcctgtacttcatctcgcccttcggtcatggactccgtccattggacgtcgagtttatgaaggcgctccaccaaagagtgaacatcgttccaattctcgcaaaagccgatacgttgacccctccagaggtagaccataagaagcgcaagatccgcgaggaaatcgagcacttcggaatcaagatttaccaatttcctgactgcgacagcgacgaagatgaggacttcaaacttcaggaccaggcactcaaggaatcgatcccatttgcggtgatcggttcgaatactgttgtcgaagcgagaggacggcgcgtccgtgggagactctatccttggggaatcgtggaagtcgaaaatccggggcattgcgatttcgtgaagctccgcactatgctggtgaggacccacatgcaagacctgaaagatgtcactcgagaaacccactacgaaaactaccgggcgcagtgcatccaatctatgactcggctggtggtgaaggagagaaacagaaacaagctgactcgggagtctggaaccgatttcccaatcccggctgtaccgccgggcactgaccctgagactgagaaactgatccgtgaaaaggatgaggagctgcgcagaatgcaggagatgctgcacaaaattcagaagcagatgaaggaaaactac

SEQ ID NO: 32558 - DNA, 1434 bp, synthetic construct
  misc_feature 1..1434: note = Description of Artificial Sequence: Synthetic coding sequence
  source 1..1434: mol_type = other DNA
atggaccggtcccttggttggcagggtaacagtgttccagaagaccggacggaggcagggattaagagatttctcgaggacactacagatgacggagaactgtctaaattcgtcaaggacttcagcgggaatgcctcgtgccacccacccgaggcgaagacatgggcgtctagaccccaggtgcccgagccaagaccacaggccccagacctgtacgacgatgacctggagttccgacccccatctcgtccacagtcatcagacaatcagcagtacttttgtgctcccgcccctcttagcccctctgccagacctcggtctccatggggcaaattagatccctacgacagctctgaagacgacaaagagtatgttggatttgccacgctccctaatcaagtgcacagaaaaagcgtgaaaaagggtttcgattttaccttaatggttgctggcgaaagtgggctaggaaaaagcacattggtcaactcgctgttcctgactgacttgtatcgtgacagaaaacttctcggggccgaggaacggatcatgcagactgtggagatcactaagcatgcagtggacattgaagagaagggcgtacggctgagattgactattgtggacacccctggctttggtgacgcagttaacaatacagagtgctggaagcccgtcgccgagtatatagaccagcagttcgagcagtacttccgggacgagtcaggactgaaccgcaagaatatccaggacaatagagtccactgctgtctctactttatcagccctttcgggcacgggctgcggcctctcgatgttgagttcatgaaagccttgcaccagagggtaaacattgtaccaatcctggcaaaggcggacaccctcacccccccggaggtggaccacaaaaaaaggaagattcgtgaggagattgagcattttggtattaagatttatcagttccctgattgtgacagcgacgaggacgaggacttcaagctgcaagatcaagcactgaaggaatcaattcccttcgcagtgatcggcagtaataccgttgtggaagcacgtggccgtcgagttcgagggaggttgtacccttggggtatcgtcgaggtcgagaatcctggccactgtgatttcgtgaagcttcgcaccatgctggtgaggacccacatgcaggacctcaaggacgtgacaagggagacacactatgagaattatagggcacagtgtatccagtctatgaccaggcttgtggtcaaggaaagaaacaggaacaaactgaccagggagtctggcaccgatttccctatcccagctgtgccccctgggactgacccagagacggagaagttgataagggagaaagacgaagagctcagaaggatgcaggagatgctgcataagatccagaaacagatgaaagagaattac

SEQ ID NO: 32559 - DNA, 1434 bp, synthetic construct
  misc_feature 1..1434: note = Description of Artificial Sequence: Synthetic coding sequence
  source 1..1434: mol_type = other DNA
atggaccgcagtctggggtggcagggcaactccgtgcccgaggacaggactgaggcaggcattaagaggtttcttgaagatacgacagatgatggtgaactgtcaaaattcgtgaaggacttcagcggaaacgccagctgccatcccccagaagcaaagacctgggctagtcggcctcaggtgcccgagcctagacctcaggcaccagatctctacgacgatgacctggaattcaggcccccttctcgaccccagagcagcgataaccaacaatacttctgtgcccccgctcctctatctccttcagctcgcccccgttctccttggggtaaattggatccatacgactcaagtgaagatgacaaggagtatgtgggattcgcaactctcccaaatcaggtccaccggaagtctgtgaagaagggatttgacttcaccttgatggtcgcaggcgagagcgggcttgggaaatcgaccctcgtgaattcactttttctgaccgacttgtatcgggaccgtaagcttcttggtgctgaggaacggatcatgcagacggtcgagatcacaaagcacgccgtcgatattgaggagaaaggcgtccgccttagattaactatcgtggacacacctgggtttggcgacgctgtgaacaatacagagtgttggaaaccagtggccgagtacatcgaccagcagtttgaacagtatttccgggatgagtcaggcctgaatcgcaaaaacattcaggacaatcgtgtccactgttgcctgtactttattagccccttcggccatggcctgagaccccttgacgtggagtttatgaaggcactccaccagcgggtgaacattgtaccaatcttggccaaggcagataccctcacaccgcccgaggtcgaccacaagaaacgtaaaattcgagaggaaatcgagcattttggtataaaaatataccagttccccgactgcgacagcgatgaagatgaggatttcaaactgcaggaccaggccctgaaggagagcataccatttgccgttataggcagtaacacagtggtcgaggcgcgcggacggcgagtacgcggcagattgtacccctggggaattgtggaggtcgagaatcccggacactgcgatttcgtgaagctcagaaccatgctcgtccgaacacatatgcaggacctaaaggatgtaacgcgggagactcactacgaaaactaccgcgctcagtgcattcagtccatgacccgactggtggtaaaggaacgaaatcgcaacaaactgacacgtgagagcggcaccgattttccaattcctgcagttccaccgggtacggaccctgaaactgaaaagcttatccgggaaaaagacgaggagcttcgccgaatgcaagagatgctccacaaaatccagaagcagatgaaggagaattac

SEQ ID NO: 32560 - DNA, 1434 bp, synthetic construct
  misc_feature 1..1434: note = Description of Artificial Sequence: Synthetic coding sequence
  source 1..1434: mol_type = other DNA
atggacaggtctttgggatggcaagggaactccgtgccggaggacaggaccgaagctggaatcaagcgctttctggaagataccaccgacgatggcgaactttccaaattcgttaaggacttctccggaaacgcatcctgtcatccgccagaagccaagacctgggcgtcccgcccgcaggtccctgaaccgcgcccacaggccccagacctgtacgacgacgatctcgaattcaggccaccgagtcggccgcagagctcagataatcagcagtacttctgcgccccggctccgctgtccccttcagcacgtccccgctcaccctggggaaagctggatccgtacgacagctcagaggacgataaggagtacgtgggattcgcgactctgccgaaccaggtccatagaaaatcagtcaagaagggattcgacttcactctgatggtggcgggagagtcgggcttgggaaaatcaaccctcgtgaactccttgttcctcaccgacctgtacagagatcggaagctgctcggagccgaagaaagaatcatgcaaaccgtggagatcaccaagcacgcggtcgacatcgaggaaaaaggagtgcgcctgcgcttgactatcgtggatacccccggcttcggggatgccgtgaacaacaccgaatgttggaaacctgtcgcggagtatatcgatcagcagttcgaacagtactttcgggacgaatccggattgaacaggaagaatattcaggataatcgggtgcactgttgcctctacttcatctccccatttggacacggactccgaccgctggatgtggaattcatgaaagccctgcaccagcgcgtgaacatcgtcccgatcctggcgaaggccgacaccctgaccccacctgaagtcgatcacaagaagcggaagatccgggaagaaatcgaacatttcggtatcaagatctaccagttcccggactgtgattcagatgaggacgaggacttcaagctgcaggatcaagcgctgaaggaaagcatcccgttcgcagtgatcggatcgaatactgtggttgaggcgagagggcggcgagtccgcggacggttgtacccgtggggaatcgtggaggtggaaaacccggggcactgcgactttgtcaagctccggacgatgctggtgcgcactcacatgcaggacctgaaggacgtgacgagagagactcattacgagaactaccgcgctcagtgcatccaatccatgaccagactcgtggtgaaggaacgtaatagaaacaagctgactagagaatcgggcaccgacttcccgatcccggccgtgcctccgggaactgacccggaaacggagaagctcattagagaaaaagatgaggaactccgacggatgcaggagatgctgcataagatccaaaagcagatgaaagagaactac

SEQ ID NO: 32561 - DNA, 1434 bp, synthetic construct
  misc_feature 1..1434: note = Description of Artificial Sequence: Synthetic coding sequence
  source 1..1434: mol_type = other DNA
atggaccggtccctggggtggcagggaaattcagttcctgaggacagaaccgaggctggcatcaaacgcttcctggaagacactactgatgatggggagctgtcaaaattcgtcaaggatttttctggaaatgccagctgtcaccccccagaggctaaaacgtgggccagtagaccccaggttcctgagccacgaccgcaggcacccgacctgtacgacgatgacctggagtttagaccaccgtccagacctcaaagttctgataaccagcagtacttctgcgcaccagcaccccttagtcctagtgccaggcccagatccccatggggaaagttggacccgtacgacagcagtgaggacgacaaagagtatgtgggcttcgcaaccctcccgaatcaagtccaccgaaagtcagtcaagaagggcttcgactttactctgatggtggcaggcgagtcagggctggggaagtccacactggtgaattctctgtttctgacagacctttacagggataggaagctgctgggggctgaagaacgcattatgcagaccgtggagataaccaagcacgctgttgatatagaggagaaaggagtgcgcttgcggctcacgattgtggacacacctggctttggggatgccgtcaacaacacggagtgttggaagcctgtcgccgagtacattgatcagcaatttgagcaatactttagagatgagtccggactcaatcgaaaaaacattcaggataaccgggtgcactgctgcctgtactttatcagcccatttggtcacgggctgagaccacttgacgtagagttcatgaaggcgctgcatcaacgagtaaatattgttcctattcttgccaaggccgacacgctgactccaccagaagtagaccacaaaaagagaaagatccgcgaagaaattgagcacttcggaattaaaatctaccagttcccggattgtgatagcgacgaggacgaggacttcaaactccaggaccaggccttgaaagagtctataccatttgccgttattggttccaatacggtcgtcgaagctagaggtcggcgcgtcagagggcggctgtatccctggggaattgtggaggtcgagaacccaggccactgcgattttgtgaaactgcgaaccatgctggtgaggacccacatgcaggatctgaaagacgtcacacgcgagacacattacgagaactatcgcgctcagtgcatccagtctatgacccggcttgttgttaaggagagaaatagaaataagctcacccgagagtccggcaccgacttccccatacctgctgtccctcccggcactgaccctgagaccgagaaactgataagagagaaggacgaggaactgcgcagaatgcaggagatgctgcacaagatccagaaacagatgaaggagaactat

SEQ ID NO: 32562 - DNA, 1434 bp, synthetic construct
  misc_feature 1..1434: note = Description of Artificial Sequence: Synthetic coding sequence
  source 1..1434: mol_type = other DNA
atggacaggtctctaggctggcagggcaactccgtccccgaagatcgaaccgaggccggtatcaagcgcttcttggaagacaccaccgacgatggcgagctgtcaaaatttgtcaaagacttttcaggcaatgctagttgtcacccaccagaagccaagacctgggcttccagaccccaagtacccgaacccaggccgcaggctcccgatctgtatgatgatgatctggaattcaggcctccatcccgcccacagagctctgataaccagcagtacttttgcgcccctgcacctctgagcccctcagcaaggcccagaagcccttggggtaagttggacccttatgattcttcagaggatgataaagaatacgtagggttcgcgacactgcctaatcaggtgcatcggaaatctgtgaaaaaggggttcgactttacactgatggtcgctggagaatccgggctcggaaagtcaacactggtgaactctctgttccttacagacctgtacagggatcgcaaactgctcggggccgaagagagaatcatgcagaccgtggaaatcacgaagcacgctgtggacattgaggaaaagggggtgagactgcgcttaacgattgtggacaccccgggattcggcgacgcagtcaataacaccgagtgctggaaaccagttgcagagtatattgaccaacagttcgaacagtatttcagggacgagtcgggcctcaacaggaaaaatatacaggacaaccgtgtgcattgctgcctgtacttcatatcaccattcggccatggtctcagacccctagatgtagaattcatgaaggccctacaccagagggtcaacattgtgcctattttggctaaggccgacaccttaacccctcccgaggtggatcataaaaagcgaaagatccgtgaggaaattgaacacttcggaatcaagatttaccagtttccagactgcgattcggacgaggacgaagactttaagctgcaggaccaggccttgaaggagtcaattccttttgccgtcataggatctaatacggtggtggaagccaggggcagacgagtcagaggtagactgtacccctggggaatcgtagaggtggaaaacccaggacactgcgatttcgtgaaactacgaaccatgcttgtaagaacccacatgcaagacttgaaagacgtaacccgcgaaactcattacgaaaactatcgggcgcagtgtattcagagcatgaccaggctggtggtgaaagagaggaaccgaaataagctcacccgagaaagtggcacagatttcccaatccccgcagttcctcctggaacagaccctgagacagagaaactaattagagagaaagacgaggagctccgcagaatgcaagagatgctacacaagatacagaagcagatgaaagaaaactat

SEQ ID NO: 32563 - DNA, 1434 bp, synthetic construct
  misc_feature 1..1434: note = Description of Artificial Sequence: Synthetic coding sequence
  source 1..1434: mol_type = other DNA
atggaccgcagccttggctggcagggaaacagcgtgccggaagatcgtaccgaggctggaatcaaacgctttctcgaggataccactgatgacggagaactgagcaagttcgtcaaggacttctcgggaaatgcctcctgccatcctccagaagcaaagacgtgggcctccagaccgcaagtgccagagcctcgcccgcaggcgcctgatctgtacgacgacgacctggaattccggcccccatcgcggccgcagtcgtcagataaccagcagtacttttgcgccccggcgcctctgtctccgtcggcccgccctcggagtccctggggtaagctcgacccttacgattcgtcggaggacgacaaagagtacgtgggttttgccacgctgccgaaccaagtccacaggaagtctgtgaagaaagggtttgatttcacccttatggtggccggcgaatccggtttgggaaaaagcaccctcgtcaacagcctcttcctcaccgatctctacagagatagaaaactgctgggagcggaggaaagaatcatgcagactgtcgaaatcactaaacacgccgttgacatcgaagagaagggtgtccggttgcgcctgactattgtcgatactcctgggttcggcgacgctgtgaataacaccgagtgctggaagcccgtcgcggaatacatcgaccagcaattcgagcagtactttcgggacgagtcggggctcaaccgcaagaacatccaggacaaccgcgtgcactgctgcctgtacttcatctctcctttcggtcatgggctcagacctcttgatgtggaattcatgaaggcccttcatcaacgagtgaatatcgtgccaattcttgccaaggcagatacgttgacccctcccgaagtggatcacaagaagcggaaaatccgcgaagaaatcgagcatttcgggataaagatctaccagttcccggactgtgattcggatgaggacgaggactttaaacttcaagaccaagcattgaaggaatcaatcccattcgcggtgatcggatcaaatactgtggtggaggcgcgcgggagacgggtgcgcggaaggctgtacccgtggggaatcgtggaggtcgaaaatccggggcactgcgacttcgtgaaactgcgcaccatgctggtaagaacccacatgcaggaccttaaggatgtcactcgggagacgcactatgaaaactacagagcccagtgcatccagtcgatgactcggctcgtggttaaagaacgcaaccggaataagctgactcgcgaatccggaaccgatttcccaatccccgctgtcccccctggaaccgacccggagactgaaaagctgatccgcgagaaagacgaggagttgcggcgcatgcaggagatgctgcacaagatccagaagcagatgaaggagaactac

SEQ ID NO: 32564 - DNA, 1434 bp, synthetic construct
  misc_feature 1..1434: note = Description of Artificial Sequence: Synthetic coding sequence
  source 1..1434: mol_type = other DNA
atggacagaagcttggggtggcaaggcaatagcgtccctgaagataggacagaggccgggatcaagcggtttctggaagacactactgatgacggcgagctgagcaaattcgtgaaagatttctcaggcaatgcgtcctgccaccctcccgaggccaagacatgggcctcgagacctcaggttccagagccacggccacaggccccagacttgtatgacgacgatctggaattccgacccccgtcccgtcctcagtcctccgacaaccagcagtacttttgtgcacccgctcctctgtctccttccgctaggccaaggagcccatggggaaagctcgatccatatgattctagcgaagacgataaagaatatgtgggctttgctacacttcccaatcaagttcacaggaagtccgtgaagaaggggttcgattttacactcatggtggcaggggagtcaggcctgggcaaatcgacactggttaacagcctcttcttgaccgatctgtaccgggacaggaagctcctgggagccgaggaaagaataatgcaaaccgtggaaattacgaagcacgccgtggacattgaggagaaaggagttcgactgcgcctcaccattgtcgacacccccgggttcggtgatgccgtcaacaataccgaatgttggaaacctgtagctgaatatatcgatcagcagtttgagcagtactttagagacgagagcggtctgaacaggaaaaacatccaagataatcgggtgcactgctgcctgtacttcatttcacccttcggccacgggcttaggcccctcgatgtggaatttatgaaggctttacaccagcgcgttaatatcgtcccgattttagccaaagctgatactctgacaccacctgaggtcgatcataagaagagaaaaattagggaggagatcgagcattttggtattaaaatatatcagttccctgactgcgattcagatgaagacgaagactttaaacttcaggaccaggccctgaaggaatctattccctttgccgtgatcggctccaatacagtggtcgaggctaggggaaggagagtgcggggacggctttacccgtggggcatcgttgaggtcgagaaccccggacactgcgattttgtgaaactaaggacgatgctggtgagaacacacatgcaggacttgaaagacgtgacgagagagacacactatgagaattatcgggcacagtgcatacaatccatgactagacttgtggtgaaggaacgcaaccgaaataaactgaccagggaatccgggactgattttccaattccagctgtaccccccggcactgacccagagacagagaaactcattagggagaaagacgaggaactgcgtcggatgcaggagatgctccataaaatccaaaagcagatgaaggagaattat

SEQ ID NO: 32565 - DNA, 1434 bp, synthetic construct
  misc_feature 1..1434: note = Description of Artificial Sequence: Synthetic coding sequence
  source 1..1434: mol_type = other DNA
atggacaggtcactgggttggcaaggtaattcagtgccagaagaccggaccgaagcgggcataaaacgatttttagaggatactaccgacgacggggagttgagtaaatttgtaaaggacttcagcgggaatgcttcttgccatccccccgaagctaaaacatgggcgtcaaggccgcaagtacctgaaccgaggccccaggcccccgacttgtacgatgatgatctggaattccgccctcctagccgcccccagtcttcagacaatcaacagtacttttgcgcccccgcacctttgtcaccctctgcaaggcctagaagcccctgggggaagctggatccttacgatagttcagaagatgacaaggagtacgttggcttcgctacactcccaaaccaggtacaccgcaagtcagtcaaaaagggatttgatttcacgctgatggtagccggagaaagcgggttgggtaaatccacgctagtaaactcattattcttgaccgatctgtatcgggatcgtaagctgctgggtgccgaagaaagaatcatgcagaccgtcgaaatcactaagcacgccgtagacatagaggaaaaaggcgttagactccgcttgacaattgtagatacacccggcttcggcgacgctgtcaacaatacggagtgttggaaacccgtcgccgagtatattgaccaacagtttgaacaatactttcgagatgagagtggcctaaacagaaagaacatccaagataatcgcgtgcactgctgcttatatttcatttcaccttttgggcatggactacggcccctagatgtggagtttatgaaggccctgcaccaacgcgtaaacatagtaccgattctggcaaaggccgacactctgactccaccagaagtagatcacaagaagaggaagattcgagaggaaatcgaacactttggaataaaaatctaccagtttccggactgcgattcagacgaagacgaggactttaaactgcaggaccaagcgctaaaagaatccattccttttgccgtaatcggctcgaacacagtggtggaagcgcggggcagacgcgtgaggggcagattgtacccgtggggcattgtggaagtcgagaatcccggccattgtgattttgtgaagctgcgcactatgctggtcagaacccacatgcaggatctgaaagacgtgacccgggaaacacattacgaaaactatagagcacagtgtatccaatcaatgacccgcctggtggtgaaagaaaggaacagaaacaaactcacccgggagtcgggaactgatttcccgatcccagcagtgccgcccggaactgaccccgaaactgagaagctgatcagggaaaaagacgaggagctgcgcagaatgcaggaaatgcttcacaagattcagaagcagatgaaggagaattat

SEQ ID NO: 32566 - DNA, 1434 bp, synthetic construct
  misc_feature 1..1434: note = Description of Artificial Sequence: Synthetic coding sequence
  source 1..1434: mol_type = other DNA
atggaccgctctctggggtggcagggaaattcagtgccggaggatcgcacggaagcaggcattaagaggtttctggaagatactaccgacgacggagagctgagcaagttcgtgaaggacttctccggcaacgccagctgccaccctccggaagccaagacctgggcgagccggcctcaagtgccagagccgcggccacaagcgccggacctctacgacgatgacctcgagtttcgcccaccatcccgcccgcaatcgtcagataaccaacagtatttctgcgccccggctcctttgtcacctagcgccagaccgcgaagcccttggggcaagctggacccgtacgactccagtgaggacgacaaggaatacgtggggttcgcaactcttcccaaccaggtccaccggaagagcgtgaagaagggatttgacttcacccttatggtcgctggagagtcaggactcggtaagagcaccctcgtgaacagcctgtttcttactgacctctaccgcgatcgcaagctcctcggggcagaggaacgaattatgcagactgtggaaatcactaaacatgcagtcgacatcgaagagaaaggcgtgaggcttaggctgactatcgtggatacccctggcttcggagatgcggttaacaacaccgaatgttggaaaccagtggccgaatacatcgaccaacagttcgagcaatactttcgggatgagagcggactgaaccgcaaaaacatccaagataatcgcgtgcattgctgcctgtacttcatttccccattcggtcatggtttgcgcccgctggatgtggaattcatgaaggctctgcatcagcgggtgaatatcgtgccgatcctggccaaggctgataccctcacgccaccggaggtggatcacaagaagcggaagatccgggaggagatcgagcacttcggcatcaagatctaccagttcccggattgcgacagcgatgaagatgaagatttcaagctccaagatcaggccctgaaggagtcgatcccttttgcagtgatcgggtctaacacggtcgtcgaagcacggggccgcagagttcggggacggctctacccctggggtattgtcgaggtggaaaaccctggtcattgtgacttcgtgaaactgagaaccatgttggtgcgcactcacatgcaggatctgaaagacgtgactcgcgaaacccactatgagaattaccgcgcacaatgcatccaatcgatgactcggctggtcgttaaggaacggaaccgcaacaagctgactcgcgaatccggcactgacttccccataccggctgtgcctccggggactgacccggaaactgagaagttgatccgggaaaaggacgaagaactgcgccggatgcaggaaatgctgcacaagatccagaaacaaatgaaagaaaactac

SEQ ID NO: 32567 - DNA, 1434 bp, synthetic construct
  misc_feature 1..1434: note = Description of Artificial Sequence: Synthetic coding sequence
  source 1..1434: mol_type = other DNA
atggatagatctctgggatggcaaggtaactcggtgcctgaggatagaactgaggcaggtattaagcgtttcctcgaggatactaccgatgatggtgaacttagcaagtttgtgaaggatttttcaggtaacgcatcgtgtcaccccccagaggcaaagacgtgggcatcaagacctcaagtcccagaaccccggccgcaagcaccagatctgtatgatgatgatcttgaatttcggccgccttcgaggccccaatccagcgataatcaacagtacttctgtgcgccggccccgttgtcgccatctgccaggccgcgttcaccttggggaaaactggacccgtacgattcctcggaagatgacaaagaatatgttggatttgctactctgccaaatcaggtccatcgcaagagcgtcaaaaagggttttgattttaccctgatggtcgcaggggaatctggtctgggaaagagcactcttgtgaactccctgttcctgaccgatctgtacagggataggaaacttcttggtgctgaagaacggatcatgcaaaccgtggagatcactaagcatgcagtggacatcgaagaaaagggagtgcgcttgagacttacgattgtggatactcctggctttggagacgcagtgaataacactgaatgttggaaacctgtggcggagtacatagatcaacaatttgagcagtacttccgggacgaatccggcctcaaccgcaagaatatccaggataatcgggtgcactgttgtctttacttcattagccccttcgggcatggactgcgcccgttggatgttgagtttatgaaagcactgcatcaacgcgtcaacatcgtgcccattcttgctaaggcggacacccttacccctcctgaagtggatcataagaagagaaagatccgcgaagagattgaacatttcgggataaagatttaccagtttccagattgcgattcagatgaggacgaggacttcaaactccaggaccaggcactcaaagaatctatcccatttgctgtgattggaagcaataccgtggtggaagcacggggacgccgcgtccggggtcgtttgtacccttggggcattgtggaggtcgaaaaccccggacactgtgactttgtgaagctgagaactatgcttgtgcgaacccacatgcaagaccttaaagacgtgactagagaaacccactacgaaaactatcgggcccagtgtattcagtccatgacccggctggtcgtgaaagaacgtaatagaaacaaactcactcgagaatcaggtactgatttccctattcctgcggtgccacccgggactgaccctgaaacggaaaagctgataagggagaaagacgaagaacttcgtcgcatgcaggaaatgctgcataagatacaaaaacaaatgaaggagaattac

SEQ ID NO: 32568 - DNA, 1434 bp, synthetic construct
  misc_feature 1..1434: note = Description of Artificial Sequence: Synthetic coding sequence
  source 1..1434: mol_type = other DNA
atggaccggtcccttggttggcagggaaactcggtccctgaagatagaacggaggcagggattaagcggttcctggaggacaccactgacgacggtgaactctcgaaatttgtgaaggatttttcgggaaacgcgtcctgtcacccgcctgaggccaagacctgggcgagccggccgcaggtgcctgaaccccggcctcaggcccctgatctgtacgatgacgacctcgagtttcgtccaccttcacgcccacagagctcagataatcagcaatacttttgtgctcccgcaccactgtccccatcggcaagacctcgatctccttggggaaaactggacccttacgattcatcggaggacgacaaggagtacgtgggatttgcaacgctgcctaaccaagtgcatcgtaagagcgtgaaaaagggtttcgattttaccctgatggtggcgggagagagtggacttggaaagtccacccttgtgaatagcctttttctgactgatctctacagggacagaaagttgctcggggcggaagaacggattatgcagaccgtcgagattaccaagcatgcagtggacatcgaagaaaagggcgtgaggctccgcctgacgatcgtcgatactcctggattcggggatgccgttaacaacactgagtgctggaagcctgtcgcggaatacattgaccagcaatttgagcagtactttcgtgacgagtcaggccttaaccgcaagaacattcaagataaccgggttcattgttgcctgtactttatcagcccttttggacatggtttgaggcctcttgacgtggaattcatgaaagcccttcatcaaagggtgaacatcgtccctatactggcaaaagcagacactctgactccacctgaagtggaccataagaagcggaagatcagagaagagattgaacacttcggaatcaagatctaccagtttcctgattgcgactcggacgaagatgaggatttcaagctccaggaccaagccctcaaagagagcatcccctttgccgtaattggttcaaatactgtcgtcgaagcacgcggtcgacgcgtgagaggacggttgtatccatggggaatcgtggaagtcgaaaacccgggacattgcgattttgtgaaacttaggactatgcttgtgaggacccacatgcaggacttgaaggacgtcactagagaaacccattacgaaaactatagagcacaatgcattcagagcatgacccggcttgtcgtgaaggagaggaatagaaataagctcactagagagtccggcactgattttcctattccagcagtgccccccggaaccgatcctgaaaccgaaaagctcattagggagaaggatgaggagcttcgacgtatgcaagaaatgctgcacaaaatccagaaacagatgaaggaaaactat

SEQ ID NO: 32569 - DNA, 1434 bp, synthetic construct
  misc_feature 1..1434: note = Description of Artificial Sequence: Synthetic coding sequence
  source 1..1434: mol_type = other DNA
atggatcgttcgctaggttggcaaggtaattcggttccggaagatcgaacggaagcgggtataaaacgatttttagaagatacgacggatgatggtgaactatcgaaatttgtaaaagatttttcgggtaatgcgtcgtgtcatccgccggaagcgaaaacgtgggcgtcgcgaccgcaagtaccggaaccgcgaccgcaagcgccggatctatatgatgatgatctagaatttcgtccgccgtcgcgtccgcaatcgtcggataatcaacaatatttttgtgcgccggcgccgttatcgccgtcggcgcgtccgcgttcgccgtggggtaaattagatccgtatgattcgtcggaagatgataaagaatatgttggttttgcgacgctaccgaatcaagtacatcgtaaatcggttaaaaaaggttttgattttacgttaatggtagcgggtgaatcgggtctaggtaaatcgacgctagtaaattcgttatttttaacggatctatatcgtgatcgtaaactactaggtgcggaagaacgtataatgcaaacggtagaaataacgaaacatgcggtagatatagaagaaaaaggtgttcgtttacgtttaacgatagtagatacgccgggttttggtgatgcggtaaataatacggaatgttggaaaccggtagcggaatatatagatcaacaatttgaacaatattttcgagatgaatcgggtctaaatcgtaaaaatatacaagataatcgagttcattgttgtctatattttatatcgccgtttggtcatggtctacgtccgttagatgtagaatttatgaaagcgttacatcaacgtgttaatatagtaccgatattagcgaaagcggatacgctaacgccgccggaagttgatcataaaaaacgaaaaatacgtgaagaaatagaacattttggtataaaaatatatcaatttccggattgtgattcggatgaagatgaagattttaaattacaagatcaagcgttaaaagaatcgataccgtttgcggtaataggttcgaatacggttgtagaagcgcgaggtcgtcgagttcgtggtcgactatatccgtggggtatagtagaagtagaaaatccgggtcattgtgattttgttaaattacgaacgatgctagttcgtacgcatatgcaagatttaaaagatgtaacgcgagaaacgcattatgaaaattatcgagcgcaatgtatacaatcgatgacgcgattagtagttaaagaacgtaatcgtaataaactaacgcgagaatcgggtacggattttccgataccggcggtaccgccgggtacggatccggaaacggaaaaactaatacgtgaaaaagatgaagaactacgtcgaatgcaagaaatgttacataaaatacaaaaacaaatgaaagaaaattat

SEQ ID NO: 32570 - DNA, 1434 bp, synthetic construct
  misc_feature 1..1434: note = Description of Artificial Sequence: Synthetic coding sequence
  source 1..1434: mol_type = other DNA
atggaccggtctctgggttggcagggcaatagcgtgcccgaggatcgaacagaggcgggcatcaaaagattccttgaggacaccacggatgatggggaactgagcaagttcgtcaaggatttttctggtaatgccagttgccaccctccggaggccaaaacatgggccagcagacctcaggtgcccgaaccccgtccccaagctcctgacctctatgatgatgacctggaattccgaccaccaagccgcccccaatcatcagataatcaacagtatttctgtgcaccagcacctctctcccccagtgcccggccacgcagcccatggggcaagttggatccttacgattcttcagaggatgacaaagaatacgtcggctttgccacacttccaaatcaggtgcacaggaagtcggtgaagaaagggtttgactttactctaatggtggctggcgagtcgggcctaggcaaatcaacgctagtcaatagcctgtttctgaccgatctgtacagagaccggaaactcctgggggcagaagaaaggatcatgcagacagttgagattactaaacacgcggtggatattgaagaaaaaggggtgcgactgagattaactattgtcgacactccaggcttcggcgacgctgttaacaacactgagtgttggaaaccagtagcagagtacatcgatcaacagttcgagcaatactttcgggatgagagcgggctgaaccgcaagaatattcaggataaccgggtccactgctgtttgtatttcattagtccttttggccacggcttgcggcccctggatgtggagtttatgaaggcactccatcagcgtgtaaatatagtacccatactcgcaaaggccgacactctgacaccacccgaggtggaccacaagaagaggaagattcgtgaggagatcgagcacttcggaataaagatataccagttccctgactgcgactcagacgaggatgaagactttaagcttcaggatcaggcccttaaggaatccatccccttcgccgttatagggtccaataccgtggtcgaggctaggggccggagagtccgtggacggctctatccatgggggattgtagaggtggagaatccaggacattgtgatttcgtcaagctccggacaatgttggttcgaacgcatatgcaggatctgaaggacgttaccagagaaacccactatgagaactacagggcgcagtgcatccagtccatgactcgcctggtggtgaaggagcggaacaggaataaactgacacgcgaatcgggaaccgacttcccaatccccgctgtcccgcctggaaccgaccctgagaccgagaagctcatccgggaaaaagacgaagaactccgccgaatgcaggaaatgctccacaaaatccagaaacagatgaaagagaactac

SEQ ID NO: 32571 - DNA, 1434 bp, synthetic construct
  misc_feature 1..1434: note = Description of Artificial Sequence: Synthetic coding sequence
  source 1..1434: mol_type = other DNA
atggaccgttcccttggttggcagggcaacagcgtgccagaagatcgaactgaggcgggaatcaagcgcttcttggaggacacgactgatgatggagaactgtcgaagttcgtcaaggatttctcgggaaacgcatcgtgccatcctccggaagctaaaacttgggcctcaaggccacaggtgcctgagccccggccacaagccccggacctgtacgacgatgacctggagtttagacctccctccagaccgcaatcctccgataaccaacaatacttttgcgcgccagcgccgcttagcccttcggctcgcccacggagcccttggggaaagctggatccctacgactcctcagaagatgacaaagagtacgttggattcgccactctcccgaaccaggtgcacaggaagtccgtgaagaaggggtttgacttcactctgatggtcgctggcgagtctggactcggaaagtctactctcgtcaactctctcttcctgaccgacctgtaccgcgatcgcaaactcctcggggccgaagaaaggataatgcagacggtggaaattaccaagcacgcagtggatatcgaggaaaaaggagtgcggctgcggctgaccatcgtggacactccgggtttcggtgacgctgtcaacaataccgaatgttggaagcctgtggcggagtatattgaccagcagttcgagcagtacttccgcgacgagagcgggctgaatcgcaagaatatccaggacaatcgcgtgcattgctgcttgtatttcatctcgccattcggacacggtctgaggcctttggacgtggaattcatgaaagctctccaccaacgcgtcaacattgtgccgatcctggccaaggccgataccctgaccccgccggaggtcgatcacaaaaagcgtaagatccgggaggaaatcgaacatttcggaatcaagatctaccagtttccggactgcgactcggacgaggacgaggatttcaaactgcaggaccaagcgttgaaggaaagcatcccctttgcagtgatcggatcaaacaccgtcgttgaggcacggggacgacgcgtgagaggccggttgtacccttgggggatcgtggaagtggaaaatcccggccactgtgatttcgtgaagttgagaaccatgctcgtgcggacccatatgcaggacctcaaggacgtgactcgcgaaacccactacgagaattaccgggcccagtgcatacaatcgatgaccaggctcgtcgtcaaagagagaaacagaaacaagctcactagagagagcgggaccgattttccgatccccgccgttccgccaggcactgacccggaaactgagaagctgattcgtgaaaaagatgaggaacttcgtcgcatgcaagaaatgttgcacaagatccagaagcagatgaaagaaaactac

SEQ ID NO: 32572 - DNA, 1434 bp, synthetic construct
  misc_feature 1..1434: note = Description of Artificial Sequence: Synthetic coding sequence
  source 1..1434: mol_type = other DNA
atggatagatcattgggttggcaaggaaactcggttcctgaggacaggactgaggcgggaataaaaaggtttcttgaggatactactgatgatggagaactttcgaagttcgtcaaagacttctccgggaatgctagctgccatcctcctgaagcgaaaacatgggcctcccgcccacaagtgcctgaacctcgtcctcaagcacctgacttgtacgatgatgatctcgagttcagacccccctctagaccgcagagcagtgataaccaacaatatttttgcgcgcctgcccccttatccccgagtgctcgcccaaggtcgccctggggaaaattggatccgtacgatagttcggaagatgataaggaatatgtcggtttcgccacgttgccaaatcaggtccatcgtaaatccgtaaagaaaggatttgacttcacacttatggttgcaggcgaatccgggttgggtaagagtaccttggttaacagcttgttcttaactgatctctacagggaccggaagcttctaggtgctgaggagagaattatgcaaactgtggagattacaaaacacgcggttgacatcgaggaaaagggtgtgcggcttagattgactatcgtggacaccccgggtttcggagatgcagttaataatacagaatgctggaaacctgtcgccgagtatatcgatcaacagttcgaacaatattttcgcgatgaaagtggacttaatagaaaaaatatccaagataaccgtgtccactgctgtctttactttattagtcctttcggtcatgggttacgccctctcgatgtggagttcatgaaggccctccaccagcgcgtcaatattgttcctattttagccaaagctgataccttgaccccaccagaagtcgatcacaaaaagcgcaagattcgtgaggagattgaacattttggcattaagatttaccaatttcccgattgcgactccgatgaagatgaggacttcaagcttcaagatcaagctcttaaagagtctattccgttcgcagtcattggatccaacacagttgtcgaagctaggggacgcagagtcagaggaaggctttacccttgggggatcgtcgaagtggaaaatccgggtcattgcgattttgttaagttgcgtaccatgctggttcgaactcatatgcaagatcttaaggatgttactcgtgagactcattatgagaactacagagctcagtgtattcaatctatgacgcgactggtggttaaggagcgaaataggaataagctgacacgggaaagcggtacagatttcccaattccagcagttccccctggaactgaccccgaaaccgagaagttaattcgcgagaaagatgaggaattacgtaggatgcaagaaatgctccataagatccagaagcaaatgaaagaaaattac

SEQ ID NO: 32573 - DNA, 1434 bp, synthetic construct
  misc_feature 1..1434: note = Description of Artificial Sequence: Synthetic coding sequence
  source 1..1434: mol_type = other DNA
atggacagaagcctcggttggcaaggaaattcggtgcctgaggaccggaccgaagcaggaatcaaacgcttcctggaagataccacggacgacggggaactctccaaatttgtcaaagacttttcaggaaacgcgagctgccacccgcctgaggccaaaacttgggcctcgcggcctcaggtgccagaaccaaggccgcaggcgcctgacctctacgatgatgacctggaattccggcccccgtcccgcccgcaatcatcggataaccaacagtacttttgcgcaccagcgcctctgagcccaagcgctcgcccccgctcgccctggggcaagttggacccatacgactcaagcgaggatgacaaggagtatgtcggcttcgcaactctgccgaatcaagtccatcggaagtcagtaaagaaaggattcgacttcaccctcatggtggctggcgagagtggactgggaaagtccactcttgtgaactccttgtttctgacggacctgtaccgagatcgaaagctccttggtgcggaagaacggatcatgcagactgttgaaatcactaagcacgcagtcgacatcgaagaaaaaggcgtcaggctgcgcttgaccattgtggacaccccaggatttggggacgccgtgaacaacactgagtgctggaagccagtcgcagaatacattgatcagcaattcgagcaatacttcagggatgagagcggtcttaatcgcaagaatatccaagacaatagggtgcattgttgtctgtacttcattagcccttttggacacggactccgcccgctcgacgtggaattcatgaaagcccttcatcagcgagtgaatatcgtgccgatcctcgcgaaggccgatactctgaccccgccggaggtggaccacaagaagcgcaaaatcagagaggaaatagaacacttcggaatcaagatatatcagtttccggactgcgatagcgacgaagatgaggacttcaagctgcaggaccaagctctcaaagaatccatcccattcgctgtgatcggctccaacaccgttgtcgaggcccggggtcgcagggttagaggtcgcctgtacccgtgggggatcgtggaagtggagaacccgggccactgcgacttcgtgaagctgcggactatgttggtgaggacccacatgcaggatctgaaagacgtgacccgcgagactcattacgagaattatcgggcacagtgcatccagtcaatgaccaggcttgtggtaaaggagcgaaacaggaacaagctgaccagagaatctgggaccgatttcccgatccccgcagtgccgccgggaacggatcccgaaacggaaaagctcatccgcgagaaagatgaggaactcaggcgcatgcaggagatgctccataagattcagaagcaaatgaaggaaaactac

SEQ ID NO: 32574 - DNA, 1434 bp, synthetic construct
  misc_feature 1..1434: note = Description of Artificial Sequence: Synthetic coding sequence
  source 1..1434: mol_type = other DNA
atggatcgctctctgggatggcaggggaactctgtgccagaggacagaaccgaagccggaataaagcgctttcttgaagacacaacggatgacggcgagttgtccaagttcgtcaaagacttttccggcaacgcctcctgccacccgcctgaagcgaagacatgggcatcacggccccaagtgcccgaaccaaggccacaagcccctgacctctatgacgatgacctggaatttagacccccttccagacctcagtctagtgataatcagcagtacttttgtgcaccggccccactgtcaccctccgctcgccccagaagtccatggggaaaactggatccatatgacagcagcgaggacgataaggaatacgtcggcttcgctactttacctaaccaagtgcatcgcaaatcagtgaaaaaaggatttgacttcaccctcatggtggccggtgaatccgggttgggcaaaagcactctggtaaattccctatttctcactgatttatacagagatcgaaaactgctgggagccgaggagagaatcatgcaaaccgtggagattactaagcacgctgtagatatcgaagagaaaggcgtgagactacgtctgaccattgtagacacccctgggtttggcgatgctgtcaataatactgagtgttggaaacccgttgctgagtatattgaccagcagttcgagcaatatttccgcgacgagagcgggctcaaccgcaagaatattcaagataatcgcgttcactgctgtttgtacttcatctcgcccttcggccacggcctgagacctctagatgttgagttcatgaaagcgctgcaccagagggtaaacatcgtgccaattctggctaaggctgacacccttacgccgcctgaggttgaccacaaaaaaagaaagatacgggaggaaattgaacactttggtattaagatctaccaattcccggattgtgattccgatgaggacgaggatttcaaacttcaggaccaggctttaaaggagtcaatacctttcgcagttataggatctaatactgtggtggaggcccgcggacgccgggttagaggtcggctgtatccgtggggtattgtagaggtggaaaatcccggccattgtgacttcgtgaaactgagaaccatgctcgtacggacacacatgcaggatttgaaagatgtcaccagggaaacccattacgaaaactaccgcgcccagtgtatccaaagcatgacacggctggtcgtgaaagagcgcaaccgcaataaactgactagagagtccgggacagacttcccaatacccgcggttcccccaggcaccgatccggagactgaaaagctcattcgggaaaaagatgaagagctgagacggatgcaggagatgttgcacaagatacagaaacagatgaaggaaaactac

SEQ ID NO: 32575 - DNA, 1434 bp, synthetic construct
  misc_feature 1..1434: note = Description of Artificial Sequence: Synthetic coding sequence
  source 1..1434: mol_type = other DNA
atggatcggagtctgggctggcaagggaacagcgttccagaagatcggactgaagcagggatcaagagatttctcgaggatactactgatgatggagaattgtctaagttcgtcaaggatttctcaggaaacgcgtcctgccatccaccagaagctaaaacctgggccagcaggccccaagtgcctgaaccaaggcctcaggccccagatctgtacgacgatgatctggagtttcgccctccgtcgcggccgcagtcatcagataatcagcagtatttctgcgcaccagcccctctgtccccttcggcccgccctcgctcgccttggggaaagctggatccctacgactccagtgaagatgataaggagtacgtcggatttgctacgcttccaaaccaagtgcaccggaaatcggtcaagaaaggctttgactttaccttgatggttgcaggcgagtcggggcttggaaagtctaccctggtgaattccctttttctcactgacctctacagagacaggaaacttctcggagcagaagaacggattatgcaaaccgttgagatcaccaagcatgcagtcgatattgaagaaaagggagtgaggctccggctcactattgtggacacccccggatttggcgacgcagtgaacaatactgagtgttggaaacccgtggcagaatacatcgatcaacaattcgaacagtatttcagagacgaatccggtcttaacaggaagaacattcaagacaatagagtgcattgttgcctgtacttcatatcgcctttcggccacggacttcgtcctctcgacgtggagtttatgaaagccctgcaccagcgggtgaacatcgtgcctattctggctaaggccgacacccttactccccctgaggtcgatcacaagaagaggaaaattcgtgaggagattgaacatttcgggataaagatataccagtttccggactgtgacagtgatgaggatgaagatttcaagttgcaggatcaagcgcttaaggaatcaatcccatttgcagtaataggtagcaacacggtggtggaggcacgcggccgccgcgtgcgtggtagactttacccgtggggaattgtggaagtggaaaatccaggtcattgtgactttgtcaagctgagaactatgctggtgagaacgcatatgcaggaccttaaagatgtgacccgggagacgcattacgaaaactaccgtgcgcaatgtatccagtccatgaccaggcttgtggtgaaggaacgcaataggaacaagctgacccgagagagcggtaccgattttcctatccccgcagtaccccctgggactgacccggaaaccgagaaactgattcgagaaaaggatgaagaactccgaagaatgcaagagatgcttcacaaaatccaaaagcagatgaaggagaattac

SEQ ID NO: 32576 - DNA, 1434 bp, synthetic construct
  misc_feature 1..1434: note = Description of Artificial Sequence: Synthetic coding sequence
  source 1..1434: mol_type = other DNA
atggaccgctccctgggatggcaggggaactcggtgcccgaagataggaccgaggccggaatcaagagatttctggaagataccaccgacgatggggaactgtcaaagttcgtgaaggatttcagcggaaacgcctcctgccacccgccggaggcaaagacctgggcctcccggccgcaggttccggagccgaggccacaagccccggacctgtatgacgacgacctcgagtttagaccaccaagccggccacagagcagcgataatcaacaatacttctgcgcaccggctccgttgtcaccttcggctagacctcgcagcccgtggggaaagctggatccatacgacagctcggaagatgacaaagaatacgtgggattcgccactttgccgaaccaggtccatcgcaagtcggtgaaaaagggttttgacttcaccctgatggtcgcgggcgaaagcggccttggaaagagcacccttgtgaacagcctgtttcttaccgacctctaccgcgatcggaaacttctgggggcagaggagcgcataatgcagaccgtggaaatcaccaagcacgccgtggacatcgaggaaaaaggggtgcggctgcgcctgactattgtcgacaccccgggattcggagacgcagtgaataacaccgagtgttggaaacctgtggctgaatacatcgatcagcaatttgagcaatacttccgagatgagtcagggctcaaccgaaagaacatccaagataaccgggtgcactgctgtctctactttatctcaccttttggccacggactgcggccgctggacgtggagttcatgaaggcgctgcatcagagggtgaatatcgtccctattctggcaaaggctgacaccctcactccaccagaagtggaccacaagaagcggaagatccgggaagaaatcgaacacttcgggatcaaaatctatcagttccccgactgcgattccgatgaagatgaggactttaaactgcaggaccaagccctcaaggagtcgatcccatttgccgtcatcggcagcaataccgtggtcgaggcaaggggcaggcgggtgcgcggacgtttgtacccgtggggaatcgtcgaagtggagaatcctggacattgcgatttcgtcaagctgcgcactatgctcgtgcgcacgcacatgcaagatctgaaggatgtgaccagggaaactcattacgaaaactacagagcgcagtgcatccaatcgatgaccagactggtggtgaaggaacgcaatcggaacaaattgacccgcgaatcgggaactgactttccgatcccggcggttccgccgggcactgacccggaaactgagaagttgattcgcgagaaagatgaagaactgagaagaatgcaggagatgcttcataagatccaaaagcagatgaaggaaaactac

SEQ ID NO: 32577 - DNA, 1434 bp, synthetic construct
  misc_feature 1..1434: note = Description of Artificial Sequence: Synthetic coding sequence
  source 1..1434: mol_type = other DNA
atggatcggtcattaggttggcaaggaaatagtgttcctgaggaccgaacggaggcaggcatcaaacgttttttggaggataccacagacgatggtgagctgagcaaattcgtgaaagacttctcaggaaacgcttcatgccatccacctgaggccaagacatgggcatccagaccgcaggttccggagcctcgtccccaggcgcccgatttgtatgacgatgacctcgagttccgcccaccaagccggccacaatcgtcagacaaccaacagtatttctgtgctcccgcgcccctgtcgccatctgccagaccacgaagcccatggggaaagctggatccttacgattcatccgaagacgacaaggagtacgtgggttttgcaacgctacctaatcaggtacatcgaaaatcggtgaagaagggatttgatttcactctcatggttgctggcgaatcagggctcgggaaatcaacactcgttaactccttgttcctcaccgacctataccgggaccgtaagttactaggagccgaggaacgtattatgcagaccgttgagataactaaacacgcagtagacattgaagaaaaaggagtacgattacgattgacgattgtcgacacccctggattcggtgatgctgttaacaacacagaatgctggaagccggtggctgagtatatcgatcagcaattcgagcaatacttcagggacgaaagcggattgaatcgaaagaatattcaggacaaccgcgtgcactgttgtctctacttcatatccccttttggacatggactgcgcccactcgacgtggaattcatgaaggccctccaccagagggttaatatagttccgatactggcgaaggctgacacgttgacgcccccggaggtggaccacaagaagcgcaagatacgcgaggaaatagagcatttcggaattaaaatttatcagttccccgactgcgattccgatgaagacgaagatttcaagcttcaagatcaagccctgaaagagtcaattccgttcgcagtgattggtagcaacactgtggtcgaggcacgaggccgacgcgtgcggggccggttgtatccgtggggtattgtggaagtcgaaaaccccggccattgtgattttgtaaaactccgaactatgcttgtgcgtactcatatgcaggacttgaaggatgtgactcgagagacccactatgaaaactacagagcccagtgtatccagtcaatgactcgcctcgtagttaaggagcgtaatcgaaataaacttaccagagagtcgggcacggactttccaattccggcagtgcctccgggcacggatcctgagaccgaaaagttgattcgggaaaaagacgaggaacttcgcaggatgcaagagatgttacacaagatccagaaacaaatgaaggaaaactac

SEQ ID NO: 32578 - DNA, 1434 bp, synthetic construct
  misc_feature 1..1434: note = Description of Artificial Sequence: Synthetic coding sequence
  source 1..1434: mol_type = other DNA
atggatcgatcgctgggatggcagggtaattcggttcccgaagaccggaccgaggccggaattaagcgtttcctggaggatacaacagacgatggcgagctcagtaaatttgtgaaggacttttctggcaacgcctcatgccatccccctgaagccaagacgtgggcctcccggccacaagtgcccgagcccaggccacaggcccccgatctatacgacgacgatttggaatttcgtcctccttccaggccacagtcatctgataaccagcaatatttctgtgctcccgctccactgtcgccttcagccagacctaggtcaccttggggaaagctggatccatatgatagctctgaggacgacaaagaatacgtcggattcgctacactacctaaccaggtccacaggaagtcggtcaaaaagggcttcgactttaccctcatggttgccggtgagagcggcctagggaaatctactctggtgaactctcttttccttactgacctatatcgcgaccgcaaactgcttggggccgaggagcggatcatgcagacggtggaaattaccaagcacgccgtggacattgaagaaaagggcgtccgactacggctgacgattgtagatacgccaggctttggagatgctgtgaacaatacagaatgctggaagccggtggctgagtacatcgatcagcaatttgagcagtactttcgggatgagagcggactgaataggaagaacatccaggataatcgcgttcattgctgtttgtatttcataagtccctttgggcacggattgcggccgctcgatgtggaatttatgaaagccctgcaccagcgggttaacatcgttccaattcttgcaaaagccgacactctgacaccgccggaagtcgaccacaagaagcggaagatcagggaagaaatcgaacacttcggcataaaaatttatcaatttcccgactgcgactctgacgaggatgaggactttaaactccaggatcaagccctgaaagagtcaatccccttcgcagtgatcggtagtaacacagttgtggaggccagggggaggcgcgttagaggtagactttacccctggggcatcgttgaagtggaaaatccgggacattgtgacttcgtcaaactgagaacaatgttggtacgaacacatatgcaggatctgaaagacgttacacgagagacacactacgaaaactaccgggcacagtgcatacagtctatgaccagactggttgtaaaggagagaaatcgaaataaactgacccgagagagtggaacggactttcctattcccgccgtgccccctgggactgacccagagacggagaaactcatcagggagaaagatgaggaactgagacgtatgcaggagatgttgcacaagattcagaaacagatgaaggaaaattat

SEQ ID NO: 32579 - DNA, 1434 bp, synthetic construct
  misc_feature 1..1434: note = Description of Artificial Sequence: Synthetic coding sequence
  source 1..1434: mol_type = other DNA
atggatcgctcccttgggtggcaggggaattccgttccagaggaccggaccgaggctgggatcaaacggttcctggaagacaccaccgacgatggggaacttagtaaatttgtgaaggatttttcaggcaacgctagttgccacccccccgaggccaaaacatgggcttctcgaccccaagtgcctgagccgaggccccaggctcccgatctgtatgacgatgacctggaatttcggccccctagtcggcctcagtcatccgacaaccagcagtatttttgtgcacccgcccctcttagtccttccgcccggcctaggtccccttggggtaagcttgatccctatgactcttctgaggacgacaaggagtacgtggggtttgccacattgccaaaccaggttcatcggaagtctgtgaaaaagggcttcgatttcactctgatggtcgcgggcgaaagtggtctgggaaagtctacactggtcaactccttgtttctcacagatctctatcgagatagaaaactgctcggcgctgaggagcggatcatgcagacagtggaaattacaaagcatgccgttgatatcgaagagaagggggtccggctgcggctgacaattgtggacactccggggttcggggacgcggtgaacaacacagaatgttggaagcccgttgctgagtatatagatcagcaattcgagcagtactttcgggatgagtccgggcttaaccgtaagaatatacaggacaaccgtgttcactgttgtctgtattttatctcgccctttggacacggtctgaggccactcgacgtggaatttatgaaggcactgcaccagagggtaaacatcgttcccatcctggccaaagcagacaccctcaccccccctgaggtggaccacaagaagcgaaagattcgagaagagattgaacactttggcataaagatttaccagttccctgactgtgactctgacgaggatgaagactttaagcttcaggaccaggccttgaaagagtcaattccttttgcggtcatcggtagcaatacagtggttgaagcaaggggacggagagtccggggcagattgtatccctggggaattgtcgaagtagagaatccgggtcattgtgattttgttaagttgcgcacaatgcttgtacggacgcatatgcaggacctcaaagacgtaactagggagacacactacgagaattatcgggcacagtgcatacagtcaatgacgagattggttgtgaaggagagaaacagaaacaaactaaccagggaatctggtactgactttcccatcccagctgtacccccaggaaccgaccccgaaacagagaagctaataagggaaaaggacgaggagttgaggagaatgcaggagatgctacacaagattcagaagcagatgaaagagaactac

SEQ ID NO: 32580 - DNA, 1434 bp, synthetic construct
  misc_feature 1..1434: note = Description of Artificial Sequence: Synthetic coding sequence
  source 1..1434: mol_type = other DNA
atggacagatcgctgggctggcagggcaactccgtcccggaagataggactgaggctggaattaagcggtttctggaagatacaactgatgatggtgagctgtctaaatttgtcaaggatttctcaggcaacgcctcctgtcatccgccagaagccaaaacttgggctagtaggccacaggtacctgaaccgagacctcaggcgcccgatctatacgatgatgacctggagtttaggcctccaagtcgcccccagtcatcagacaaccagcagtatttttgcgcaccagccccccttagccccagtgccaggcctcggagcccctggggtaagctggatccttacgatagcagtgaggacgacaaggaatacgttggatttgctacactgccaaaccaagtccaccggaagagcgtcaaaaaaggttttgattttaccctgatggtcgcaggtgaaagcggacttgggaagagcacactagtcaactctctgttcctgaccgacctctatcgggaccgaaaattgttaggagctgaggaaagaataatgcaaacagtggagataaccaagcatgcagtcgatatcgaggagaaaggagtgaggcttcgcctgaccatcgtggataccccagggttcggcgacgcagtgaacaataccgaatgctggaaaccagttgccgaatacattgaccagcagtttgaacagtattttcgggatgaaagcgggctgaatagaaaaaacattcaagataacagagttcactgttgtctgtatttcatttcacccttcggacacggtcttcgcccactggacgtggagtttatgaaagcactccatcagcgagtgaacattgtcccaatcctcgctaaggctgacacacttacacctccagaggtggatcacaagaagcgcaaaataagagaagaaatcgagcattttggcatcaagatctaccagttccccgattgcgatagtgatgaggatgaggacttcaagctccaggatcaagccctgaaagagagcatccctttcgctgtgattgggtccaacactgtggtggaggccaggggaagacgtgtccgcggcagactttacccctggggaatcgtggaagttgagaatccagggcattgtgattttgtgaagttacgaacaatgctggtgaggactcacatgcaagatttaaaggacgtgaccagggagacacattatgaaaactacagggcccaatgcatccagtcaatgacacgattggtggtaaaagagcggaacaggaacaagctcaccagggaatctgggaccgatttccctatccctgccgtccctccaggcacagatccagagaccgaaaaactgatcagagaaaaggatgaagagctccgaagaatgcaagaaatgcttcacaaaatccagaagcaaatgaaggaaaactac

SEQ ID NO: 32581 - DNA, 1434 bp, synthetic construct
  misc_feature 1..1434: note = Description of Artificial Sequence: Synthetic coding sequence
  source 1..1434: mol_type = other DNA
atggatcgttcacttggatggcaaggaaactccgtgcctgaagatcgcacggaggcaggtatcaagcgcttcctcgaagatactacggacgacggcgagctgtcaaagttcgtaaaagatttctcgggaaacgcctcgtgtcatccacctgaggccaagacgtgggcctcccggccgcaagtccccgaaccccgccctcaggcaccagacctctacgatgatgacctggagtttcggcctccatcgaggccccaaagctccgacaaccagcaatacttttgtgcacccgctccactttcaccgagcgcaagaccacgatcgccttggggcaagttggatccttacgattcgagcgaagatgataaagaatacgtgggctttgccaccctgccaaaccaagtgcacagaaagagcgtgaaaaaaggttttgattttactctgatggtcgcaggagaatcggggctgggaaaatcaactttggtgaattcgttgtttttgaccgatctttatagagatcgcaaactgctgggggccgaggaaagaattatgcaaaccgtcgaaattacgaaacatgcagtcgacattgaagaaaaaggtgtcagactccgtcttacgatcgtcgatactcctggatttggagacgcagtgaacaatacggagtgttggaaaccagtggcggagtacatagatcagcagttcgagcaatactttcgggacgagtccggtctgaacagaaagaatatccaggataatagggtgcactgctgtctttacttcattagcccgttcgggcacggactccgcccgctcgacgtggaattcatgaaggcactgcatcagcgtgtcaacatcgtgcctatcctcgcgaaagcagatactcttactccaccagaagttgatcacaagaagcggaaaatccgggaagaaatagaacattttggaataaagatctatcaattcccagactgcgattcggatgaggatgaagatttcaaactgcaggaccaagcactgaaagaatcgattccattcgcagtgattggttcgaatactgtcgtggaggcgagagggcgtagagtgagaggcagactttacccttggggtatcgtggaagttgagaatccgggccattgcgactttgtgaaacttcggaccatgctggtgaggactcacatgcaagatctgaaggacgtgactcgcgagactcattacgagaactaccgcgcacaatgcattcagagcatgaccagactggtggttaaggaaagaaacaggaataaactcacgcgggagagcgggaccgactttcctattcccgcagttcctcctggaactgacccggagacggaaaagctgatacgggaaaaggatgaagagctgcgacgcatgcaagagatgcttcataagattcaaaagcaaatgaaggagaactac

SEQ ID NO: 32582 - DNA, 1434 bp, synthetic construct
  misc_feature 1..1434: note = Description of Artificial Sequence: Synthetic coding sequence
  source 1..1434: mol_type = other DNA
atggataggtccctgggctggcagggcaattcggttccagaggacaggaccgaggctggaatcaaacgttttctggaggacaccaccgacgacggtgagctgagcaaattcgtcaaggacttctcggggaatgcgagctgccatccacctgaggcaaagacgtgggcatccagaccccaagtgcctgagcccagacctcaggcaccagatctgtacgatgatgatctcgagtttagacctccctcgaggccccaatctagcgataaccaacagtacttttgtgcacctgcccccctttcgccatctgcacgtccacgatcgccttggggaaaacttgatccctacgacagcagcgaagatgataaggaatacgtcggtttcgccactctccctaaccaagtgcatcggaagtcagtcaagaagggtttcgactttactctgatggtcgcaggggagtcaggactgggaaaatcgacccttgtgaactcactgtttttgaccgatctgtatcgcgatcggaagctgctgggtgcagaggagaggatcatgcaaactgtggagataaccaagcacgccgtggatattgaagaaaagggagtgaggctgagactcaccattgtcgacacccctggttttggcgacgcagtcaacaacaccgaatgttggaaacctgtggcagaatacatcgatcaacaattcgaacaatacttccgcgatgaatcgggccttaatagaaagaatatccaagataaccgcgtgcactgttgtctttacttcatctccccttttggacatggtctgcgccccctggacgtggagtttatgaaggcactccaccaaagggtgaatatcgtgcctattctggccaaggccgacacgctcaccccaccagaggtcgatcacaagaaaagaaagatccgcgaggaaattgagcattttggtatcaagatttaccagttccctgactgcgattcggatgaagatgaagatttcaagttgcaggatcaagccctgaaagaatcgatcccatttgcagtcatcggttcgaataccgtcgtggaagcccgcgggcgccgagtgcggggcaggctgtacccctggggaattgtggaggtggaaaaccctggacattgcgactttgtgaaactcaggactatgttggttaggacgcatatgcaggatctgaaggacgtgactcgtgaaacccactacgagaattaccgagcccagtgtattcagtccatgacccgccttgtagtcaaggaacgcaaccgaaacaaacttaccagagagagcgggaccgatttccctatacccgcagtccctcccggcaccgaccctgaaactgaaaagctgattagagagaaggatgaagagctcagacgaatgcaggagatgctgcataagattcaaaagcagatgaaggagaactac

SEQ ID NO: 32583 - DNA, 1434 bp, synthetic construct
  misc_feature 1..1434: note = Description of Artificial Sequence: Synthetic coding sequence
  source 1..1434: mol_type = other DNA
atggataggtccctcggatggcagggtaatagcgtccctgaggatcggaccgaagccggaattaagcgctttctcgaagataccaccgacgacggggaacttagcaagtttgtgaaggatttctccggaaacgcaagctgtcatcctccagaagcgaaaacgtgggcttcacgaccacaggtcccggaacccagaccccaagcgccagacctttacgacgatgatcttgagtttaggcctcccagccggccccagagctctgataatcagcaatacttctgcgcacctgctcctctttcgcccagcgctagaccacggagcccatggggaaagctggacccgtacgactcctccgaggatgacaaggagtacgtcgggtttgcgactctcccaaaccaggtgcatagaaagagcgtcaagaaaggctttgattttaccctgatggtggcaggagaatccgggctggggaaaagtacgttggtgaactccctgtttctgactgatctctaccgggatagaaaactcctgggtgcagaagaaagaatcatgcaaactgtggaaatcaccaagcacgctgtggatattgaagaaaagggcgtgagactcaggctgactatcgtggatacccctggatttggcgacgcagtgaacaataccgagtgttggaagcctgtggcagaatacattgaccaacagttcgaacagtattttcgtgatgagtccggtctgaaccggaaaaacatacaagataatagggtccactgttgtctgtatttcatctcaccatttgggcatgggctgaggccactggatgtggaattcatgaaggcgctgcatcagagggtcaatatcgtgcctatacttgcaaaggcagacacgcttacccctcctgaggtggaccataagaaaagaaagatcagagaagaaatcgaacatttcggaattaagatatatcaatttccagactgtgattcggacgaggatgaagatttcaaacttcaagatcaggccctcaaagagtccattccattcgcagtgatcgggtcgaacaccgtggtggaagcacgaggtcgacgggtgagaggacggctttacccttggggaatcgtggaggtggaaaacccaggccattgcgattttgtgaaacttcggaccatgcttgtcagaacccatatgcaggacctgaaggacgtgaccagagaaacccactacgagaattaccgtgcccagtgcatacaatccatgactaggctggtggtgaaagaaagaaacagaaataagctgacgcgagagtcgggtactgattttcctattcccgccgtgccacctggtactgatccagagactgaaaagctcattcgcgaaaaggatgaagaactcagacggatgcaggaaatgttgcacaagatccagaagcagatgaaggagaattac

SEQ ID NO: 32584 - DNA, 1434 bp, synthetic construct
  misc_feature 1..1434: note = Description of Artificial Sequence: Synthetic coding sequence
  source 1..1434: mol_type = other DNA
atggataggtcactcggatggcaggggaattccgtgcctgaagataggactgaagcaggaataaaaagatttctggaagatacaacagacgatggggagctatctaaattcgtaaaagatttcagtgggaacgcgtcgtgtcacccacctgaagctaaaacttgggcatctcggccacaggtacccgagcccagacctcaggctcccgacctttacgatgatgatctcgaattcaggccaccctcgcggcctcagtcttccgataatcagcagtatttttgcgcccccgccccactctcacctagtgccaggcctagatctccatggggaaaactggatccctacgattcctctgaagatgataaagaatacgtggggttcgctacactacccaaccaggtgcaccgaaagtccgtcaaaaaaggatttgactttacacttatggtcgcaggagaatcggggctcggaaaatctactctagtaaacagtttattcctcacagatctttatcgggatcgaaaactgctgggagctgaagaaagaatcatgcagacagtggaaataacaaaacatgccgttgacattgaagaaaagggagtacggctgcgactcactattgttgacactccaggatttggggatgctgtgaataatactgagtgttggaaaccagtcgccgaatatatcgaccagcagttcgaacagtatttccgtgatgaatctggacttaaccgcaaaaatatacaagataatagagtgcactgttgcctatacttcatctcccccttcgggcatgggctaagaccccttgatgtggaattcatgaaagctctacaccagcgggtcaatattgttcccatattggccaaagctgatacacttactccacctgaagtggaccacaaaaaaaggaagatccgggaggaaatagaacattttggaataaaaatttatcagtttccagattgtgactccgatgaagatgaagatttcaaactccaagaccaagctctcaaagaatcaatcccattcgccgttatagggagtaatactgtcgtggaagctcgggggcgccgggtgaggggaagactgtacccctgggggatagtagaagtggaaaaccccgggcattgtgatttcgtcaaacttaggacaatgctggtgcgcacacacatgcaagatttgaaagacgtgacaagggaaactcattatgaaaattatagggctcagtgtatccagtctatgacaagactggttgtgaaagaacgaaataggaacaaactcacacgagaatccggaacagatttcccaattcctgccgtgccccccggaacagatccagaaacagaaaaattgatacgcgaaaaggatgaagaattaagaagaatgcaggaaatgctccataaaattcagaaacagatgaaggaaaattat

SEQ ID NO: 32585 - DNA, 1434 bp, synthetic construct
  misc_feature 1..1434: note = Description of Artificial Sequence: Synthetic coding sequence
  source 1..1434: mol_type = other DNA
atggaccggagtcttggctggcaggggaatagcgtacctgaagacaggacagaggcaggcataaagagattcctcgaagatactactgacgacggtgaactgtctaaattcgtcaaagatttcagtggaaacgctagctgccacccgccggaggctaaaacatgggccagcaggccacaggtccccgagcctcgaccacaagccccagacttgtacgatgatgaccttgagtttaggcctccttctaggccacagtctagcgataatcaacagtatttctgcgcaccagctcccctgtcccctagcgcgcgcccccggtcaccatggggtaagctggatccttacgatagctctgaggacgacaaggagtacgtgggtttcgctaccctaccaaatcaagtgcaccgcaaatccgtcaaaaaaggctttgattttacactgatggttgctggcgaaagtgggcttgggaagtctaccctggtcaactcactcttcctgacagatctgtatagagatcgcaaacttcttggagcagaggaacgcattatgcagactgtcgaaatcaccaaacacgccgtagacattgaagagaaaggcgttaggcttaggctgaccatcgtggatacaccgggctttggagatgctgtgaacaacactgagtgttggaaacctgtcgcagaatacatagatcagcagttcgagcaatactttagggatgagtctggattgaaccgaaaaaacatccaggacaatagagtacattgctgtttgtactttatcagccctttcggccacggtctcaggcccctggacgtggagttcatgaaggctctccaccaaagagttaatatcgtacctatcttggcaaaggcagatacattaacccccccagaggttgaccacaaaaaaaggaagatcagagaagagattgaacactttggtatcaagatctatcaatttcctgattgcgactctgacgaggacgaagattttaagcttcaggaccaggctctaaaagaatcaattccctttgccgtcatcggcagtaacacagtagttgaggccagaggtcgcagggtcagggggcggctgtatccatggggcatcgtcgaggttgagaaccctggacattgcgatttcgtgaaactaagaacgatgctggttcgcacccatatgcaagatttgaaagatgtcacgcgggagacccattacgaaaactatagggctcagtgcatacaatctatgactagactggtcgtgaaggagagaaacagaaataaactgactcgggagtctggcaccgatttcccgattcctgcagtgccgcccggtactgacccagagacagaaaaacttatccgcgagaaggatgaagaactcaggaggatgcaagagatgctgcacaagattcaaaaacaaatgaaagaaaactac

SEQ ID NO: 32586 - DNA, 1434 bp, synthetic construct
  misc_feature 1..1434: note = Description of Artificial Sequence: Synthetic coding sequence
  source 1..1434: mol_type = other DNA
atggacagaagtttaggctggcaaggaaatagtgtcccagaagatagaacggaggctggaataaagcgtttcctcgaagatacgactgatgatggagaattgagtaagtttgttaaggatttctctggtaatgcgagctgccatccaccagaagctaagacatgggcttcaagaccacaagtgccggaaccacgcccccaggctccagatctctacgatgacgaccttgagtttcgcccaccatccagaccacaatcttctgataaccagcaatatttctgtgcaccagcaccactttctcctagtgcacgcccgcgatcaccatggggtaagctggatccatacgattcatccgaagatgacaaggagtatgtcggattcgctacgttaccgaatcaagtacaccgaaagagtgttaagaaaggttttgatttcactttgatggtcgccggcgaatcaggacttggtaaaagcacactggtaaatagtctattccttactgatttataccgtgatagaaaacttctcggagcagaagaaagaatcatgcaaactgtggaaataacaaaacatgccgtagatattgaagaaaaaggtgtccgcttgcgattaacaatcgtagataccccaggttttggagatgcagttaacaatacagaatgctggaaaccagtcgccgaatatattgatcaacaatttgagcaatattttcgcgatgaatccggacttaaccgtaagaatattcaagataatagagtacattgctgtttgtatttcatctctcccttcggtcatggattgcgaccacttgatgttgaattcatgaaggcactgcaccaaagggtgaatattgttccgatccttgccaaggctgacacattaacaccgccagaggtcgaccataagaaacgaaaaatacgagaagaaatcgagcatttcggaattaaaatataccaatttccggattgcgatagcgatgaggatgaggattttaagcttcaggaccaggctttaaaggaatcgattccttttgctgtgattggatccaatacggttgtagaagcacgggggcgacgagtgcgcggaagactttatccctggggtatcgtagaagttgaaaatcctggacattgtgatttcgtgaaactccgtacaatgttggtccgaacccatatgcaagatctcaaagatgtaactcgggagactcattatgaaaattatcgagcccaatgtattcagtcaatgaccaggttggtcgttaaggaacgcaatagaaataaactcaccagagagtcgggaacggacttccctatcccggccgttccaccgggtacagatcctgaaacggagaaattaattagagagaaagatgaggaattacgcagaatgcaagagatgcttcacaagattcagaagcaaatgaaagaaaattat

SEQ ID NO: 32587 - DNA, 1434 bp, synthetic construct
  misc_feature 1..1434: note = Description of Artificial Sequence: Synthetic coding sequence
  source 1..1434: mol_type = other DNA
atggatcgctccctgggatggcaaggtaacagcgtgccggaggacagaaccgaggccggaatcaagcggttcctggaagacactaccgacgacggagaactgtccaaattcgttaaggacttctcgggaaacgccagctgtcacccgccggaagccaagacctgggcttcaaggccgcaagtgccggaaccgaggcctcaggccccggatctgtacgacgacgaccttgagtttagaccaccgtcacggccgcaatcatccgataaccagcagtacttctgcgctccggcgcctctgtcaccctcagcgcgcccgcggtcgccatggggaaagctcgacccgtacgattcgtctgaggacgataaagagtacgtgggcttcgcaaccctgccaaatcaagtccatcgcaagagcgtgaagaagggattcgattttactctgatggtggcaggagagtctggactcggaaagtccacgctcgtcaattcattgttccttactgacttgtaccgggaccggaagttgctcggtgccgaggaacgcatcatgcaaaccgtcgagattaccaaacacgcagtggacatcgaagagaagggagttagactgcggctgactattgtggacacccccggtttcggcgatgctgtcaacaatactgaatgctggaagccggtggcggagtacatcgaccaacaattcgagcagtattttagagacgaatcgggccttaatcgtaagaacatccaggataaccgggtgcactgttgcctgtacttcatcagcccgttcggccatggtcttaggccgctggacgtggaatttatgaaggccctgcaccagagagtcaatatcgtgccgatactggcgaaagctgacaccctgactccgccggaggtggaccataagaaaagaaagattcgcgaagagatcgaacacttcggaatcaaaatctaccaatttccagactgtgactctgatgaggacgaggactttaagttgcaagatcaggctctcaaggaatccatccccttcgccgtcatcggatcgaacacggtcgtcgaagcgagaggccgccgcgtgcgaggaagactgtacccgtggggaattgtggaagtggagaatccaggccactgcgatttcgtgaaacttaggactatgctcgtccgcactcacatgcaggacctcaaggacgtcaccagggaaactcactacgaaaactaccgcgcccaatgcatccaatcaatgacccggctggtcgtgaaggagagaaacagaaacaagctgactagggaatccggcaccgacttcccaatccctgcggtgccgcctggaaccgacccggagacggaaaagctgatcagagaaaaggacgaggaactccgaaggatgcaggaaatgctccacaagattcagaagcagatgaaggagaactac

SEQ ID NO: 32588 - DNA, 1434 bp, synthetic construct
  misc_feature 1..1434: note = Description of Artificial Sequence: Synthetic coding sequence
  source 1..1434: mol_type = other DNA
atggatcgcagtttagggtggcagggaaactccgtgcccgaagatcgcactgaggcagggatcaaacggttcctggaagatacaactgacgatggagaactatccaaattcgtgaaagatttcagtgggaatgcatcatgccacccccccgaggctaaaacttgggcctcacggcctcaggtgcctgaaccacggccacaggcccccgatctttatgatgatgatcttgaatttagacctccttcaagacctcagtcctccgataaccaacagtacttctgtgctcccgcccccctgtctccatctgcgaggcctcgaagtccctgggggaaactcgatccatatgattcttccgaagatgataaagagtatgtgggattcgccactttgcctaatcaggtgcacaggaaaagtgtaaaaaaagggttcgactttacactgatggtggccggggagtctggactgggaaaaagtacactcgtgaactctttattcctgacagacctatacagggacaggaaactacttggagccgaagaacggattatgcagactgtggaaataactaaacatgccgtcgatatcgaggagaaaggagtacgcctcagactgacaatagtggacactccaggattcggagatgcagtgaataatactgaatgctggaaaccagtagcagaatacatagatcagcagtttgaacagtatttcagagatgaatcggggctcaacaggaaaaatatacaggacaatcgcgtgcattgctgtctctatttcatctctccattcggacatggactgcggcccctggatgtcgaattcatgaaagccctgcatcaaagggtaaatatagtcccaattcttgctaaagcagatactctgacaccaccagaagtcgatcacaaaaaaagaaaaatacgggaagaaattgaacacttcggaataaaaatttaccagtttccagattgtgattccgatgaggacgaggatttcaaactccaggatcaggctttaaaagaatctatacccttcgctgtgataggaagtaacacagtggttgaagcacgcggaagacgagtgcgagggcgactgtatccatgggggattgtagaagtagaaaaccctggacattgtgattttgtcaaattaaggactatgttagtacgaactcatatgcaggatctgaaagatgtgacacgagaaactcattatgagaattacagggcccaatgcatacagtctatgacaaggctcgtagtgaaagagcggaaccgaaacaaattaactcgagaatctgggacagatttcccaatccctgccgttcctcctgggactgatcccgaaacagaaaaactgatccgggaaaaagacgaagaacttcggcgtatgcaggaaatgctgcacaaaatacaaaaacagatgaaggagaattat

SEQ ID NO: 32589 - DNA, 1434 bp, synthetic construct
  misc_feature 1..1434: note = Description of Artificial Sequence: Synthetic coding sequence
  source 1..1434: mol_type = other DNA
atggatcgaagtcttggatggcagggcaactctgtgccagaagatcgcactgaggccggaattaagcggttcctggaggacaccaccgatgacggagagttgtccaagttcgtcaaggacttcagcgggaacgcatcctgccatccgcccgaggctaagacgtgggcatcaagaccgcaggtgccggaacctcgtccacaggcgccagacttgtatgatgacgacctcgaatttcgtccaccgtcaaggccgcaatcatcggacaatcagcagtatttctgcgctccggccccactctcaccgtcggccaggcctagaagcccgtggggaaagctggatccttacgactcatccgaagatgataaagaatacgtcggatttgctaccctgccgaaccaggtacaccgcaagtccgtgaagaagggatttgacttcactctgatggtggccggggagtccggtcttggtaagtcgaccctggttaactccctctttctgactgatctttaccgcgacaggaaactcctcggggccgaggaacgaatcatgcaaaccgtggaaatcacgaagcatgcggtggacatcgaagagaagggcgtgcgcctccggctgaccattgttgatactccaggattcggagacgctgtgaacaataccgaatgctggaagcccgtcgcagagtacatcgatcagcagttcgaacagtacttcagagacgaatcgggtctgaacagaaagaatattcaagacaaccgcgtgcactgttgcctctacttcatctcgcctttcggccatggacttcgccccctcgacgtagaattcatgaaagcacttcatcagcgcgtgaatatagtgccgatcctggccaaagcggacaccctcactccaccggaagtcgaccacaaaaagcgaaagatccgggaagaaatcgagcattttggcatcaaaatctaccagtttcccgattgcgactccgacgaggatgaggatttcaagctgcaggaccaagccctgaaggaatctatcccattcgcagtgatcgggtccaatactgtcgtcgaagcgcggggccgtcgggtgcgcggccgcctgtacccttggggaatcgtcgaggtggagaacccgggacactgtgacttcgttaagctgcggaccatgcttgtgcgcactcacatgcaggacctgaaggatgtaactcgcgagacgcactacgagaactaccgtgcccaatgcatccaaagcatgacccgcctggtcgtgaaggaacggaacaggaacaaactgactagagaatctggcaccgatttccctatccccgcggtgccacctgggactgatccggaaaccgagaaattgatccgggaaaaagatgaggaactgcgccggatgcaagagatgttgcacaagattcaaaaacaaatgaaggagaattac

SEQ ID NO: 32590 - DNA, 1434 bp, synthetic construct
  misc_feature 1..1434: note = Description of Artificial Sequence: Synthetic coding sequence
  source 1..1434: mol_type = other DNA
atggataggtctttgggatggcagggtaacagcgtgccggaggacaggactgaggccgggatcaaacggttccttgaggatacaacagatgatggggagttgtctaaattcgtcaaggactttagtggtaatgcaagctgtcaccccccagaggcaaaaacctgggcttcacggcctcaggttcctgagccaagacctcaggctcccgacctgtatgatgacgatctggaattccgaccgccatctaggccacagagctcagataaccagcagtacttttgcgctcctgctccactctcaccaagcgcccgaccccggtccccttggggcaaactggacccttacgattcttctgaggatgataaagagtacgtcgggttcgctacccttcctaatcaggtacaccgaaagtccgtgaagaagggattcgacttcaccctcatggtcgccggggagagcggtctcggaaaatctactttggtcaattccctgttcctgactgacctttacagagacagaaaactgctgggcgctgaggaaaggatcatgcagacagtggaaataaccaagcacgccgtggacatagaggaaaagggtgttaggctgcgcctgactatcgtagacactccagggttcggagatgcggtgaacaataccgagtgctggaagcccgttgctgaatacatcgaccaacagttcgaacagtactttcgcgatgaatctggattgaatcggaagaacatacaggataaccgagtccactgttgcctgtatttcatttcccctttcggccacggcctgcgccctctggatgtggaattcatgaaggccctgcaccagcgggtcaacattgtgcctattttggccaaggccgacacacttactccgccagaggtggatcacaaaaaacgcaaaatccgggaggagattgaacattttggtatcaagatttaccagtttccggactgcgactccgatgaggatgaggacttcaagttgcaggaccaggcccttaaagaatcaatcccttttgctgttattggatctaataccgtggtagaggctagagggcggcgagtgagggggcggctttacccttggggaattgtggaggtcgaaaacccggggcactgcgattttgtgaaactgaggacgatgctggttagaactcacatgcaagaccttaaggatgtgaccagagaaacacactacgaaaactacagggctcagtgtattcaaagtatgacccggcttgtggttaaggaacgcaataggaacaagctcacacgggaatcaggaacagatttccctatccccgccgtgccgccaggtacagacccagagacggagaagttgattcgggagaaagacgaggaactgcggaggatgcaagaaatgttgcataaaattcagaagcagatgaaagaaaactac

SEQ ID NO: 32591 - DNA, 1434 bp, synthetic construct
  misc_feature 1..1434: note = Description of Artificial Sequence: Synthetic coding sequence
  source 1..1434: mol_type = other DNA
atggatcgctcattgggctggcagggtaactcggtgcctgaggacaggactgaagccggtatcaagaggttcctggaagataccaccgacgatggtgagctgagcaaatttgtgaaggactttagcggcaacgcatcctgccacccgcctgaagctaagacctgggcttcgcggccgcaggtgcccgaacctcgcccgcaagcgccggacctctacgatgacgatctggaattccgccctccgtcgcgccctcagagctcagacaaccagcaatacttctgcgccccggcaccgttgtcgccttctgcccgtccacggtccccgtgggggaagctggatccgtacgactcgtcagaggatgataaggagtacgtgggatttgctacccttccgaaccaggtccatcgcaagagcgtgaagaagggctttgatttcaccctgatggtggctggagagtctggactgggaaagagcactctcgtgaattcgctcttcttgacggatttgtatagagatcggaagctgctgggcgcggaagagagaatcatgcagaccgtggagatcactaaacacgccgtggacattgaagagaagggagtgcgactccgcttgacgattgtggacactcctggtttcggagatgctgtgaacaacacggaatgctggaaaccggttgcggagtacatcgatcaacagttcgaacagtacttccgcgacgagtcgggactgaatcgcaagaacatacaggataacagagtgcactgctgcctgtactttatctcaccattcggccacggcctgcggccactggacgtcgaattcatgaaggcccttcaccagagagtcaacatcgtgcctattctcgccaaggcagataccctcaccccgcccgaggtcgaccacaaaaagcgcaagatccgcgaagagatcgaacactttggtatcaaaatctaccagttcccggattgtgactctgatgaggacgaggacttcaagctccaggaccaggcactcaaggaatcgatccctttcgccgtgatcggatcaaataccgtggtggaagcacggggcaggcgggtgcggggcaggctctacccatgggggatcgtggaagtcgaaaatccgggtcactgcgacttcgtgaagctgcgcactatgcttgtcaggactcatatgcaggatctgaaagacgtgacccgggaaacgcactacgaaaactacagagctcaatgtatccagtcaatgactcggctggttgtgaaagaaaggaatcgcaacaaattgacccgtgaatccggcactgatttcccgatcccagccgtccctcccggaactgatcccgaaactgagaagctgatcagagagaaagatgaggagctgcgcagaatgcaggaaatgctgcacaagatccagaagcaaatgaaagaaaactac

SEQ ID NO: 32592 - DNA, 1434 bp, synthetic construct
  misc_feature 1..1434: note = Description of Artificial Sequence: Synthetic coding sequence
  source 1..1434: mol_type = other DNA
atggatcgaagcttgggctggcagggaaactccgtgcccgaggaccggaccgaggccggcataaaaaggttcctcgaagacactacagacgacggggagttatccaaatttgtgaaagatttttctggtaatgcctcctgtcatcctcccgaagccaagacctgggcatctcgccctcaggtcccggagcctcggccccaagcccccgatttgtacgatgacgatctggagttcagacctccgtccagaccccagtcaagcgacaaccagcagtacttttgtgcaccagcaccattgagtccgtcagcacgtcctcgctccccatggggaaaactagacccttacgatagtagcgaagacgataaggagtatgtgggcttcgccacgctgccaaatcaagtccaccgtaagtcagttaagaagggattcgattttacactcatggttgcgggtgaatcgggattggggaagtccaccctcgtcaattccctctttctgactgacctgtatcgcgacagaaaacttctcggtgccgaggagagaatcatgcagactgtggaaatcacaaagcatgctgtggatatcgaggagaagggggtgagattgcggctcaccatcgtggatacgcccgggttcggagatgctgttaataacactgaatgttggaagcctgtcgctgagtatatcgatcagcagttcgagcagtactttagggatgaaagcgggctgaatcggaaaaacattcaggataatcgcgtgcactgctgtctttactttatttctcctttcggtcatggactgcgtccactggacgtagagtttatgaaagccctgcaccagagggtaaacattgttcccatattggcaaaggcggacacattaacccctccggaggtggaccataaaaagaggaagatcagagaggaaatagagcattttggcattaagatctaccaatttccagactgcgacagcgacgaggatgaggattttaaactccaggaccaagcccttaaagaatccataccatttgctgtcatcggtagcaatacagttgtggaagcccgcggaagaagagtgcgcggtcgactgtacccatggggcatcgtggaagtcgagaatccgggacactgcgattttgtgaagctgaggacgatgctcgtgcgaacccacatgcaggatcttaaggatgttacgcgcgagacgcattacgagaactacagggctcagtgcatccagagcatgaccagactggttgtaaaggaacgaaacagaaacaaactcacgcgtgagagcggaactgatttccccattcccgcagtccccccaggcaccgaccctgagacggaaaagctgatccgtgagaaggatgaagagctccgcagaatgcaggagatgcttcacaagatacaaaagcagatgaaagagaactat

SEQ ID NO: 32593 - DNA, 1434 bp, synthetic construct
  misc_feature 1..1434: note = Description of Artificial Sequence: Synthetic coding sequence
  source 1..1434: mol_type = other DNA
atggaccggtccctcggctggcagggcaacagtgttccagaggaccggacagaggctggaatcaaacggttcctggaggataccactgacgatggggagctttccaagttcgtgaaggacttctcggggaatgcgtcctgccacccacctgaagctaagacttgggcttccaggccgcaggtgccagaaccgagaccacaagccccggacttgtacgacgacgatctggagttccgacctccttcacgtccacagtcctcagacaatcagcagtatttctgtgccccggctcccctgagtccatctgctagaccacgcagtccatggggaaagctggatccctatgacagttccgaagatgacaaggagtatgttgggttcgccaccctgccgaatcaagtccataggaagtcggtgaaaaagggcttcgattttaccttgatggtcgcaggagagagtggcctggggaaatcaacccttgtgaattcattattcctcactgatttataccgcgatcgtaaactcttaggagcagaagaaagaattatgcagacagtggaaataaccaaacacgccgtcgatatcgaagagaagggcgtgcgcctgaggctgaccatagttgacacccctgggttcggtgatgccgtaaacaataccgagtgctggaagcccgttgccgagtacatagatcaacaatttgagcaatacttccgagacgagtctggactgaacagaaaaaacattcaggacaatcgagtacactgctgtctttactttatctcccctttcggtcacgggctgcgcccactggatgtagaatttatgaaagccctgcaccagcgggttaatatagttcctattcttgcaaaagccgacaccttgaccccaccagaggtagatcataagaagaggaaaatcagagaagagatcgagcattttgggatcaagatttaccagttcccagactgtgatagtgatgaggacgaagacttcaagctccaggaccaagccctcaaagagtctatcccgttcgctgtaattggttcaaacacagtcgttgaggctcgtggtcgtcgggttcggggccgtctctacccctgggggattgtggaggtcgagaatccaggccactgtgacttcgtgaagctgcggactatgcttgtccggacccacatgcaagatctcaaagacgtgacacgcgagacccactatgagaattaccgcgcacaatgcatccagagcatgactagactagtggtaaaggagcgcaatcgtaacaagttgacccgagagagcggaactgatttcccaatcccggcggtacctccgggcactgaccccgaaacagaaaagctcatccgggagaaggacgaggaactgaggaggatgcaggagatgttgcataaaatccagaagcagatgaaagaaaattac

SEQ ID NO: 32594 - DNA, 1434 bp, synthetic construct
  misc_feature 1..1434: note = Description of Artificial Sequence: Synthetic coding sequence
  source 1..1434: mol_type = other DNA
atggacaggagcctcggatggcaggggaactcggtgccggaagatcgcacggaggcaggcatcaagcggtttctggaagataccactgacgatggggagctgtccaagtttgtgaaggatttctcaggtaacgcctcttgccaccctccggaggccaagacatgggcttctcggcctcaggtgccagaaccaagacctcaagcacccgatttatacgacgatgacttggagtttcgaccaccatcaaggccccagagtagtgataaccaacagtatttttgcgccccagctcccctaagccccagcgcgagaccccgatctccctggggcaagctggacccctatgacagcagtgaagacgacaaagaatacgtgggtttcgctacgctgccgaatcaagtgcatcgcaaatctgtcaagaaggggtttgacttcaccttgatggtagccggtgagtcagggcttggtaagagtaccctcgtgaactccttgttcttgaccgatctgtatcgggaccggaaactgctgggtgcggaggagaggattatgcagacagtggaaattactaaacacgctgtggatattgaagagaagggagtgaggctgcggcttactattgtggatacccccggctttggggacgccgtgaacaataccgagtgctggaagcctgtggcagagtatatagaccaacagtttgaacaatacttccgagatgaaagcggtctgaatcgcaagaacatccaagacaaccgcgtccattgttgcctgtattttatcagtccgttcggacacgggttgagacctctggatgtggagttcatgaaagccctccaccagagggtcaacatcgtccctattctcgccaaggccgataccctgacaccccctgaagtggatcacaaaaaacggaaaatacgcgaagagatcgagcacttcggcatcaagatatatcagttcccggactgtgattccgacgaggacgaggactttaaattacaggaccaggcgcttaaggaatctatcccttttgctgtgatcggatcgaatacggttgtggaggctcgaggccgcagggtaaggggcagactctatccctggggcatcgtagaggttgaaaatcccgggcactgcgacttcgtgaaactgagaactatgctcgtgaggacacacatgcaagatttaaaggacgtcaccagagaaacccactatgaaaattaccgggcacaatgcatacaaagtatgacgaggcttgtggttaaggagaggaaccgcaacaaactgacgcgggaaagtggtaccgactttcctatccctgctgttccgcccggcacggatccggaaactgaaaagctgattcgcgaaaaggacgaggagctccggaggatgcaggaaatgttgcacaagatccagaaacagatgaaagagaattac

SEQ ID NO: 32595 - DNA, 1434 bp, synthetic construct
  misc_feature 1..1434: note = Description of Artificial Sequence: Synthetic coding sequence
  source 1..1434: mol_type = other DNA
atggacaggtcattgggctggcaaggaaatagtgtgcccgaagatcgtaccgaagcaggtattaagcgcttcctggaggacactactgacgatggcgaactgagtaagttcgttaaggacttctcgggcaatgcctcctgccatcctcctgaagccaaaacctgggccagtaggccccaagtcccagaaccacggccccaggctcctgatttatatgacgacgacctggagtttcggcccccaagtcggccgcagtcttccgataaccagcagtacttctgtgcacccgcccctttgagcccatcagcaagacctcgatctccctggggaaaactggacccctatgatagcagtgaggatgacaaggagtatgtgggcttcgctactctgcccaatcaggtgcatcgtaagtcggtgaagaaagggttcgactttacacttatggtcgctggggaaagcggactggggaagagtactctggtgaattccctattcttgacagacctgtatcgcgaccggaagctgctgggcgctgaagagagaatcatgcagacagtggagatcaccaagcatgcagtggatatcgaggagaaaggggtaagacttcggttgacgattgtggacacgccagggttcggcgatgccgtgaataatacagagtgttggaaacccgtagcggaatacatcgaccagcagtttgaacagtatttccgagatgagtccggactcaatcgcaaaaacatccaggataaccgcgtgcactgctgcttgtactttatcagtccctttggtcatggattgagacctctcgatgtcgagtttatgaaggccctgcatcagcgtgtgaacattgtgcccattcttgccaaggccgatacccttactcccccagaggtggatcataagaagagaaaaattcgcgaggagattgagcacttcgggatcaaaatctaccagttcccggactgtgactcagacgaggacgaggatttcaagttacaagaccaagccctaaaagaaagcatcccattcgcggtaattggtagcaacaccgtggtggaagcccgcggacgtagggtcagagggcgcctatacccctggggaattgtagaggtcgagaatccaggccattgcgacttcgttaagcttcgcactatgttggtgcgtacccatatgcaggatcttaaggatgttacacgtgaaactcactatgagaattaccgcgctcagtgtatccagagcatgacaaggctggtcgtgaaggagcgcaacaggaataaattgacacgggagtctggtacagatttcccgatcccagctgtgcccccaggcaccgatccagagactgaaaaattgattcgggaaaaggacgaagagctgaggcggatgcaggaaatgctccacaagatacaaaaacagatgaaagaaaactac

SEQ ID NO: 32596 - DNA, 1434 bp, synthetic construct
  misc_feature 1..1434: note = Description of Artificial Sequence: Synthetic coding sequence
  source 1..1434: mol_type = other DNA
atggacaggagccttggttggcagggaaacagtgtgccagaagacagaacagaagctggaattaagcgttttctcgaagatacaaccgacgatggtgagcttagcaagttcgtcaaagacttcagcggtaatgcaagttgccacccaccagaggctaagacttgggccagccgccctcaggtacccgaaccacgtcctcaggctccagatctctacgatgatgacctggagtttcgtccacctagccgccctcagtcctcagacaaccagcaatatttctgtgcccctgcaccattgagcccatccgcacgtccacgctccccctggggtaaactggacccctatgacagtagcgaggacgacaaagaatatgttggcttcgcaaccctgcccaaccaagtccataggaaatcagttaaaaagggattcgattttaccctgatggtggccggtgagtccggcctgggcaagagcacccttgtaaactctctttttctcactgatctctaccgtgatagaaaactcctcggagcagaggaacgcattatgcaaacagtggagattacaaaacacgccgtggacattgaggagaagggtgtccgcctgcgcctgaccatagtcgatacacccggatttggtgatgctgtcaacaacactgagtgttggaagcctgtggctgagtacattgatcaacagttcgaacaatatttccgtgatgagtctggtctgaacaggaagaacatccaagacaacagagtccattgttgcctgtattttatcagccccttcggacacggcttgaggccactggatgttgagttcatgaaagctctccatcagagagtaaatatcgttcctattttggctaaagctgatacattgaccccccccgaggtcgatcacaagaagcgtaagatacgtgaggaaatcgagcacttcggaattaagatttaccagtttcccgattgcgactctgacgaggatgaggatttcaagctccaggaccaggctctcaaggaatctatccccttcgctgtcattggcagtaataccgtggtcgaagctagaggacgccgcgtccgcggccgcctttacccatggggtattgtggaggtagaaaaccccggacactgcgactttgtgaaactgaggactatgttggtgaggacccatatgcaggacctcaaagacgtcacccgcgagacacactatgagaactatcgcgcacaatgcatacagtctatgacaagactggttgtgaaggaacgtaatagaaataaattgacccgcgaatccggaacagacttccctatacccgcagtgcctccaggtaccgatccagagactgaaaagctgatcagggagaaagacgaggagctgaggaggatgcaagaaatgctgcataaaatacagaagcagatgaaggagaattac

SEQ ID NO: 32597 - DNA, 1434 bp, synthetic construct
  misc_feature 1..1434: note = Description of Artificial Sequence: Synthetic coding sequence
  source 1..1434: mol_type = other DNA
atggacaggtcccttggatggcaaggcaatagcgtgccggaagatagaaccgaagcaggtataaagagatttctggaagataccactgatgatggcgaactttccaaatttgtgaaggacttttcggggaacgcatcctgtcatccgccagaggcaaagacttgggctagtagacctcaagtgcctgagccgcgtcctcaggcaccagacctctacgacgacgaccttgagtttaggccacctagccggccacaatcatccgataatcaacaatacttttgtgccccagcaccccttagcccttccgctcgcccaagatccccatgggggaaacttgatccctacgattcgtcagaggacgacaaggaatacgtcggatttgctaccctgcctaaccaagtgcatagaaaatccgtgaaaaagggttttgactttactctgatggtcgcaggagaatcgggtcttggcaagagcacgctcgtcaattccctttttctgaccgacctttaccgggataggaagctgctgggtgctgaggaaagaatcatgcaaaccgtcgaaattaccaagcacgccgtcgacattgaagagaagggtgtgcgactccgactcaccattgtggataccccaggattcggagacgcagtgaacaacactgaatgctggaagcctgtggcagaatacattgatcagcaattcgaacagtactttagagacgagtcaggactcaacaggaagaatatacaggataaccgcgtgcactgttgtctgtactttatctccccatttgggcacggcctgaggcccctggatgtggagttcatgaaagcacttcaccaacgagtgaacatcgtgccaattctcgcaaaggctgacactcttactcctcctgaagtcgaccataagaagcgcaaaattcgggaagagattgagcatttcggaataaagatttaccaatttccggattgcgattcagatgaggatgaggactttaaactccaagatcaggcactgaaagaatccattcccttcgcagtgatcggatcgaataccgtcgtcgaagcgcgcgggagacgcgtgcgaggacggctgtacccctggggcattgtcgaggtggaaaaccccggccattgcgactttgtcaaactgcgaactatgctggtccgtacccatatgcaagatctgaaggatgttactagggagactcattacgagaattacagggcacaatgtatacaatctatgactcggcttgtggtgaaggaaaggaaccgtaacaaactgacccgtgagagcggcactgactttccaataccagccgtgccacctggaaccgatccagagactgagaaactgatcagagaaaaggatgaagagcttcgtagaatgcaggaaatgctgcataagatacagaagcaaatgaaggaaaactac

SEQ ID NO: 32598 - DNA, 1434 bp, synthetic construct
  misc_feature 1..1434: note = Description of Artificial Sequence: Synthetic coding sequence
  source 1..1434: mol_type = other DNA
atggaccgctcgttgggatggcagggaaattcagtgccagaggaccgcactgaagctggcatcaaacgcttcttggaggatactaccgatgatggagagctgtcaaagtttgtgaaagacttctcgggtaacgcttcctgccaccccccggaagccaagacttgggccagccgcccacaggtcccggaaccaagaccacaggcccctgacctttacgatgatgatctggaattccgacctccgagcagaccacagagctcggataaccagcagtacttttgtgcgccggcacccctgtcaccgtcagctagaccacgcagcccgtggggaaagctggatccctacgattcgagcgaggatgacaaggagtacgtgggatttgccaccctcccgaatcaggtgcacaggaagtcggtcaagaagggattcgacttcaccctgatggtggccggagaaagcgggctggggaaatcgactctggtcaactcgctgtttctcactgacctctaccgcgatcgcaaactgctgggagcggaagaaagaatcatgcaaaccgtcgaaatcacgaagcatgccgtggatatcgaagaaaagggtgtcaggctgcggcttaccatcgtggacaccccgggatttggcgacgccgtgaacaatactgagtgctggaagcctgtggctgagtacatcgatcaacagttcgaacaatactttcgggacgagtcgggcctgaacagaaagaatatccaagacaatcgggtgcactgctgcctctactttatctcgccctttgggcatggactgcgcccgttggatgtggagtttatgaaggctctgcatcagcgcgtgaacattgtgcccattctcgcgaaggccgacacccttaccccacctgaggtggaccataagaagcgaaagatcagggaggagatcgaacacttcggaatcaaaatctaccagttcccggactgcgattccgacgaggacgaggacttcaagctgcaggatcaggcactgaaggaatctatcccgttcgcagtgatcggctcgaacaccgtcgtggaagcacgcgggcggagggtgcggggccggctgtacccctggggaatcgtggaggtggagaacccgggacactgcgactttgtgaaactccgtaccatgctggtccggacccacatgcaggatctgaaagatgtgacccgcgaaactcattacgaaaactaccgcgctcagtgcattcagtccatgacgcggctggtggttaaagaaagaaatcgcaacaaactcacccgggagtcaggcactgattttccgattcccgccgtgcctccaggtactgatccagagacggagaagctgatccgcgaaaaggacgaagagttgcggcggatgcaggagatgctgcacaagatccagaaacaaatgaaggaaaactac

SEQ ID NO: 32599 - DNA, 1434 bp, synthetic construct
  misc_feature 1..1434: note = Description of Artificial Sequence: Synthetic coding sequence
  source 1..1434: mol_type = other DNA
atggatcgttcccttgggtggcagggaaatagtgtgcctgaagaccgaacagaggccgggatcaaacgattccttgaggacacgacagatgacggggaactgtctaaatttgtcaaggacttctcagggaatgcatcctgccaccccccagaggccaagacatgggcttcaaggccccaggtgcccgaacccagaccccaggcccctgatctatatgatgatgacctggaatttcgccctccttctaggccacagtcgtctgataatcagcaatatttctgcgccccggcccctctgtcgcccagcgcccgacccaggtccccctggggcaagttagatccatacgactctagcgaggacgacaaggagtatgtagggttcgccacgctgcctaaccaggtgcatcggaagtcggtcaaaaagggcttcgattttactctgatggtggctggggaaagcggactgggcaaatccacactggtgaattctcttttcctgaccgacctgtacagagatcgcaagttgctgggtgcggaggagcggattatgcagaccgtcgagattacaaagcacgcagtggatatcgaggaaaagggggtccgcttgcgtctgactatcgttgacactcctgggttcggagatgcagtgaacaacacagaatgctggaagccggtggccgaatacattgaccagcaatttgagcagtatttcagggacgaatctggtctcaatcggaagaacatccaggataacagggtgcactgttgcctgtacttcatttcaccctttgggcacggcctacggcctttggatgtggagttcatgaaggcactgcatcagcgtgtgaatattgtcccaatcctagcgaaagcggacactttaaccccccccgaggtcgatcacaaaaagagaaaaatacgcgaagagattgagcacttcggaattaaaatatatcagtttccggactgcgactccgacgaggatgaggactttaagctccaggaccaagcactgaaagagtccataccgtttgccgtcatagggtctaacacagtagtggaagccagagggaggcgggtgcgcggccgcctgtacccatgggggatagtggaagtcgagaatccaggtcactgcgatttcgtcaaattacggaccatgttggtccggactcatatgcaagatctcaaggatgtaactcgtgaaacccattatgaaaactatcgcgctcagtgcatacagtccatgacccgcttggtggtcaaagagcgcaaccgcaataagctaaccagggagagtggcacagacttcccgatcccagccgtccctcctggaactgaccctgagacggagaagctaattagagagaaagatgaggagctgagacggatgcaggagatgctccacaaaattcagaaacaaatgaaggaaaactat

SEQ ID NO: 32600 - DNA, 1434 bp, synthetic construct
  misc_feature 1..1434: note = Description of Artificial Sequence: Synthetic coding sequence
  source 1..1434: mol_type = other DNA
atggatcggtcgctgggctggcagggcaatagcgtccctgaggaccgcaccgaggcaggaatcaagcggttcctggaggacaccactgatgatggagagctgagcaagttcgtgaaagacttctcaggcaacgcttcctgccatcccccagaagccaagacgtgggcgagcaggccgcaggtgccggagccacggccacaagctccggacctttacgatgacgacttggaattccggccgccgtcgcgcccacagtcctcggataatcagcaatacttctgcgcgccggcccctctctcccctagcgcaaggcctcgcagcccgtggggaaaactggacccctacgactcgtcggaggatgacaaggaatacgtgggatttgccactctcccgaatcaggtgcaccgcaagtcggtcaaaaagggtttcgattttactctcatggtcgcaggggaatccggactggggaagtcaacgttggtgaactctctgtttctcaccgatctgtaccgggatagaaagctgctgggagctgaggagagaataatgcagactgttgaaatcactaagcacgccgttgacatcgaagaaaagggagtccgtctccggctgaccatcgtggatactccaggatttggcgacgcggtcaacaacacggaatgctggaaaccagtggcggaatacatcgatcagcaattcgagcagtacttccgcgatgagtcaggactcaaccgaaaaaatatccaagacaaccgcgtgcactgctgcctgtacttcatctccccttttggtcatggcctgaggccactggacgtggaattcatgaaggccctgcatcagagggtgaatatcgtgccgatcctggccaaagccgataccctcaccccaccggaagtggaccataaaaagcgcaaaattcgcgaagaaatcgaacactttggaattaagatctaccaattccccgactgtgacagcgacgaggatgaggacttcaaactccaagaccaagcgctcaaggagtccattccattcgccgtgattggttccaacactgtcgtggaagctagaggacgccgggtccgcggcagactgtatccctgggggatcgtggaggtggaaaacccgggacattgcgacttcgtaaagctgcggaccatgcttgtgcgcacccacatgcaggacttgaaggatgtcaccagagagactcactatgaaaactacagagcacagtgtatccagtcgatgactaggctcgtcgtgaaggaaagaaatcggaacaaacttactcgcgaatcagggaccgatttccctatccctgccgtgccgccgggcaccgacccggaaaccgaaaagttgatccgagagaaggacgaagagctgcggcggatgcaagagatgcttcacaagatccagaagcagatgaaggaaaactac

SEQ ID NO: 32601 - DNA, 1434 bp, synthetic construct
  misc_feature 1..1434: note = Description of Artificial Sequence: Synthetic coding sequence
  source 1..1434: mol_type = other DNA
atggaccgttcgttgggatggcaaggcaatagcgtgcccgaagaccgcacggaggccgggatcaagaggttcctggaggacactactgacgacggcgaacttagcaagtttgtcaaggatttttcgggcaacgcttcctgccacccacctgaagccaagacctgggcatcgcgcccccaggtgcccgagccaaggcctcaggctcctgatttgtatgacgatgatctggagtttcgcccgccgtcccgccctcaatcctctgataaccagcagtacttctgcgctccggcccccctgtcgccctctgctcggccgcgttctccgtggggaaaactggacccttacgattccagcgaagatgataaggagtatgtaggttttgccacgctcccgaatcaggtccacaggaagagtgtgaagaaaggctttgatttcactctgatggttgctggcgaaagtggcctaggcaagtcgaccctggtgaacagcctgttcttaacagatctgtatcgagatcggaagctcctgggggcggaggagaggattatgcagaccgtcgaaattaccaagcacgcggtagatatcgaagagaaaggtgttagattgcgcctgacaatcgtcgacacccccgggttcggagacgctgtcaacaacaccgaatgttggaagccggtcgcagagtatatcgatcaacaatttgaacagtattttcgcgacgaaagcggattaaatcgcaagaacatacaagataatcgcgtgcactgctgtctttactttattagccctttcgggcatggactccggccgcttgatgtcgaattcatgaaagctctgcaccagcgggtgaacatcgtgccgatattggccaaggcggataccctgacgccgccagaagtggaccacaagaagcgaaagatcagagaagaaatcgaacacttcggcattaagatctaccaattccccgactgtgatagcgacgaggatgaagattttaagctgcaggatcaagcactgaaggagagtattcccttcgccgtgatcggatctaatactgtcgtggaagcgcgtggtcgtcgagtccggggacgcctctacccgtggggcatcgtggaggtggaaaacccgggtcactgcgattttgtgaaactccgcactatgctggtgagaacccatatgcaagacctcaaagatgtcacacgcgagacgcactacgagaactaccgcgcgcaatgtatccagtcgatgacacgactggtcgtgaaggagcgaaacaggaacaagctcacgcgcgagtcgggtaccgatttcccgatacccgcagttccgcctggaacggatccggaaactgaaaaactaatacgtgaaaaggacgaggaacttcgacgcatgcaggagatgcttcacaaaatccagaagcaaatgaaagagaactac

SEQ ID NO: 32602 - DNA, 1434 bp, synthetic construct
  misc_feature 1..1434: note = Description of Artificial Sequence: Synthetic coding sequence
  source 1..1434: mol_type = other DNA
atggatcgctcactgggatggcaaggcaattcggtgcccgaagatagaaccgaggcgggaatcaaaaggttcctggaagatactactgacgacggcgaactgtccaagttcgtcaaggatttttcgggaaacgcctcgtgccatccaccagaagcaaagacctgggcgtcgcggccccaggtcccggagccgcgcccgcaagctccagatttgtacgacgacgatcttgagttccggccaccgtcgcgtccgcaatcgtccgataatcaacagtatttctgcgcaccggccccactctccccctccgctcgcccacgctcaccgtggggaaagctggatccgtatgatagctcggaggacgataaggaatacgtcggatttgccaccctgcccaatcaggtccacaggaagtccgtcaagaagggcttcgacttcactctcatggtggctggcgagagcggactcggaaagtcgactctcgtgaattccctctttctcactgacctgtaccgcgatcggaagctgctgggagcggaagagagaatcatgcaaaccgtggagatcaccaagcatgcggtcgatatcgaagagaagggagtgcggctgcggcttactatagtggacaccccgggattcggggacgcagtgaataacaccgaatgctggaagccggtcgcggagtatattgaccaacagttcgaacagtacttccgcgacgaatccggacttaacaggaagaatattcaggataatagggtgcactgctgcctgtacttcatttcccctttcggtcacggcctgaggcccctggatgtcgagtttatgaaggccctgcatcaaagggtgaacatcgtccctattttggccaaggccgacactctgactccgcccgaagttgatcacaagaagcggaaaattcgggaagagatcgaacacttcggaatcaagatctaccaattcccggactgtgactccgatgaagatgaggacttcaagttgcaggatcaagccctcaaagaatccatcccgttcgcagtcatcgggtctaacacggtcgtcgaagctaggggacgacgcgtgcggggacgcctctacccgtggggaatcgtcgaggtggaaaatccaggacactgcgactttgttaagctgcgcaccatgctcgtccgcacgcacatgcaggacctgaaggacgtgacccgagagactcattacgagaactacagagcccaatgcatccagtcaatgactcgcctggtggtgaaggagcgcaacaggaacaagctgacccgggaatcgggtaccgactttccaatcccggcggtgccgccgggaacggacccggaaaccgaaaagctgatccgggagaaggacgaagagctccggagaatgcaggagatgctgcacaagatccagaagcagatgaaagaaaactac

SEQ ID NO: 32603 - DNA, 1434 bp, synthetic construct
  misc_feature 1..1434: note = Description of Artificial Sequence: Synthetic coding sequence
  source 1..1434: mol_type = other DNA
atggaccgctccctgggttggcaaggcaacagcgtgccagaggaccgcactgaggcgggtattaaacgcttcctggaagacacgacagacgacggtgaattgtccaagttcgtgaaggatttcagcggcaacgcttcttgccaccctccagaagcgaagacttgggccagccgccctcaagtgcctgagccacgtcctcaggctcctgacctgtatgatgatgacctagaattccgccccccgagccgcccccaaagcagcgacaaccaacagtacttctgcgctccagcaccactgagcccaagcgctcgcccgcggtccccatggggtaagttggacccatacgatagctcagaagatgacaaggaatatgtggggtttgcaaccctgcctaatcaagttcatcgtaaatctgtgaagaagggttttgattttactctcatggttgccggcgaatccggtctgggtaaatccaccttagtgaactcactgttcctaacggacctctaccgcgatcgcaaactgctgggtgcagaagaacgcatcatgcagacggtggaaattacgaaacacgccgtggacatcgaggagaagggtgttcgcctgcgattgactattgtggacactccgggattcggagatgcggttaataataccgagtgttggaaaccggtggcggaatatatcgaccaacaattcgaacaatactttagggatgagtctggcctaaatcgcaaaaatatccaagacaatcgcgtgcactgttgcctttactttatttcgccgtttggccacggcttaaggccactggacgttgagttcatgaaagccctgcaccagagagtcaacattgtaccgatcctggccaaggccgatacgctcactcctccggaagtggaccacaaaaagcgcaagattcgggaggaaattgagcacttcgggatcaaaatataccagttccctgattgtgacagcgatgaagacgaggactttaagctgcaggatcaagcactgaaggagagcattcctttcgcagtgattggcagcaacaccgtcgtcgaagcacgtgggcgtcgtgtcagaggcaggctgtatccgtggggtattgtggaggtcgagaacccaggtcactgcgacttcgttaaactgagaactatgctggtgcgcacacacatgcaagatctgaaggatgtgacccgtgagacgcattatgagaactacagagcacagtgtatccagtctatgactcgcctggtagtcaaagaacgcaacaggaacaagttgacccgcgagagcggtaccgatttcccaattccggcagttcctccgggtaccgatccggaaacggaaaagctgattcgtgagaaggatgaggagctacgccgaatgcaggaaatgctgcataagattcagaagcagatgaaggagaactac

SEQ ID NO: 32604 - DNA, 1434 bp, synthetic construct
  misc_feature 1..1434: note = Description of Artificial Sequence: Synthetic coding sequence
  source 1..1434: mol_type = other DNA
atggatcgatcccttggatggcaaggaaattccgtgccagaggataggactgaggctgggattaagcgatttctcgaagataccactgatgatggagaactctcgaagttcgtgaaggacttttccggaaatgcaagctgtcacccaccagaagcaaagacctgggcaagcaggccacaggtgccagaacctcgaccacaagcacctgacctttacgatgatgaccttgaatttagacccccgagccggcctcagtcatccgacaaccagcagtacttttgcgcacctgcacctctctccccttcagctagacctagatccccctggggcaagctcgacccatacgattcaagcgaagatgataaggaatacgtcggtttcgcaactctgccaaatcaggtgcacaggaagtcagtgaaaaaggggttcgatttcacgcttatggtggccggtgaaagcggactgggaaagtcgactcttgtcaactccctctttctgaccgatttgtacagagatcgaaaactccttggagcagaagagagaattatgcaaaccgtggagatcaccaagcacgcggtcgatatcgaggagaagggtgtgagactgcggctgactattgtggatacccctggctttggcgatgcagtgaataacaccgaatgttggaagccagtggccgagtacattgatcagcaattcgaacaatactttagagacgagtcgggccttaaccgcaaaaacatccaagacaatcgggtccattgctgtttgtactttatcagcccttttggacatggactccggcctctcgatgtggaattcatgaaggctcttcatcaacgcgtgaatattgtgccaatccttgccaaagccgataccctgactccccctgaggtggaccataagaaaagaaaaatccgggaggaaattgaacacttcggcattaagatatatcagttcccagactgtgactctgacgaagatgaggactttaagctgcaagatcaggcccttaaagaaagcataccttttgccgtgattggatcaaataccgtggtggaagcgagaggccggcgagtcagggggagactttacccgtggggaatcgtggaagtggagaaccctgggcattgtgattttgtgaagctcagaaccatgctggtgagaactcatatgcaggatctgaaagacgtgacgagggaaacccactacgagaattaccgcgcccaatgtatccaaagcatgactcgcttggttgtcaaggaacgcaatcgcaataagctgactcgggaatcaggtacggattttcctatccctgcagtgccccctggaactgatcctgaaaccgagaagctgattcgagagaaagatgaagagctccggaggatgcaggaaatgctgcataagatccaaaagcagatgaaggaaaactac

SEQ ID NO: 32605 - DNA, 1434 bp, synthetic construct
  misc_feature 1..1434: note = Description of Artificial Sequence: Synthetic coding sequence
  source 1..1434: mol_type = other DNA
atggatagatcgctgggctggcagggcaactctgtgccagaagatcgaacagaggcaggcatcaagcggttcctcgaagacactaccgatgacggcgagttgagcaagttcgtgaaagattttagtgggaatgcatcctgtcaccctcctgaagccaagacctgggcgagcaggcctcaagttcccgaacctcgaccacaggcccccgacctttacgatgacgacctcgagtttcgtcctccttcaagaccacagagttccgataatcagcagtacttttgtgctcctgcccctcttagccctagtgcaaggccgagaagtccttgggggaaactggatccatatgactcgtccgaggatgacaaggagtatgtaggtttcgcaactctccccaaccaggtgcacagaaagtccgtgaaaaagggctttgattttaccctcatggtcgccggggagagtggtctcgggaagtctaccctcgtgaactcgttgttcctgactgacctttatagggacaggaaattgctcggggccgaggaaaggatcatgcagaccgtggagattaccaagcatgctgtcgatatcgaggagaaaggtgtgagactgaggctgaccattgtggatactcctgggttcggagacgctgtgaacaacactgaatgctggaagcctgtagcggagtacatagatcagcagtttgaacagtactttcgagacgagtcagggctcaacagaaagaatatccaagacaatagggtgcattgttgcctatatttcatttctccttttggccacggcctgcggcccctggatgttgaattcatgaaggctctgcatcagcgagtaaatatcgttccaatcctggctaaagcggataccctcaccccccctgaggtggaccataagaaacggaaaatcagagaggagatcgagcattttggtatcaagatctaccagtttccggactgtgacagcgatgaggatgaggattttaagctccaggatcaagcattgaaggaaagtattccgttcgcagtgatcgggtcgaatacggtggttgaggctcgtggacgtagagtccgcggtcggctgtatccatggggtatcgttgaggtggagaacccaggacactgtgatttcgtcaagctgagaaccatgctcgttcgcacccacatgcaggatttgaaggatgtcacacgggagactcactacgagaattatcgcgcccagtgtattcagagcatgacccggctggtggtgaaagaaaggaaccggaacaaattgactagggaaagcggaaccgatttcccaatccctgctgttccacccggtaccgaccccgagaccgagaagcttatccgcgagaaggatgaagagctgagaagaatgcaggaaatgctgcataagatccagaagcagatgaaagagaattac

SEQ ID NO: 32606 - DNA, 1434 bp, synthetic construct
  misc_feature 1..1434: note = Description of Artificial Sequence: Synthetic coding sequence
  source 1..1434: mol_type = other DNA
atggaccggtcgctgggctggcagggtaattcggtaccggaagatagaactgaggccggcatcaagcggttcctggaggacactactgacgacggggaactgtccaagtttgtgaaggatttctccggaaacgccagctgccacccacctgaggctaaaacttgggcgtccagacctcaggtcccggaaccgcgcccacaagcgcccgacctctatgatgatgacttggaattcagaccgccatcgcgcccgcagtccagtgacaatcagcagtacttctgcgctccggcgccgctgtccccaagcgcacgccccaggagcccttgggggaaactggacccgtacgatagttcggaggatgacaaagaatatgtgggattcgcgacccttcctaaccaggtgcacaggaagtctgttaagaaggggtttgatttcactctcatggtggctggagaatcaggactgggtaagagcaccctcgtcaactccctcttcctgacggatttgtaccgcgaccgcaaattgctgggcgccgaggagcgcatcatgcaaacggtcgaaatcactaagcacgccgtggatatcgaagagaagggcgtgagactgaggctcacgattgtcgacaccccggggttcggtgacgccgttaacaatactgaatgctggaaaccagtggcggaatacatcgaccaacaattcgagcagtacttccgcgatgaatccggattgaatcggaagaatatccaggataatcgggtccattgctgtctgtacttcatctcaccattcggtcatggactccgacccctggatgttgagtttatgaaggcactccaccaacgggtgaacatcgtgccgatactggccaaagcagataccctgacgccgccagaagtggaccataagaaacgcaagatcagagaagaaatcgaacactttggaatcaagatttaccaatttcccgattgcgactcggacgaggacgaggacttcaagttgcaggaccaggcccttaaggaatcaatcccattcgctgtcatcggttcaaacactgtagtggaagctcgaggaaggcgcgtgcggggcagactgtacccgtggggtatcgtcgaggtggagaacccagggcattgcgacttcgtcaaattgaggaccatgcttgtcagaacgcacatgcaggatcttaaagacgtgaccagagaaacccattacgaaaactaccgcgcacagtgtatccaaagcatgacccggctcgtggtgaaggagcggaacaggaacaagttgactagagaatctggaaccgactttccaatccccgccgtgccgccaggcaccgatcctgagactgagaagctcattcgggagaaagacgaagagctgcggagaatgcaagaaatgctgcacaagatacagaagcagatgaaggaaaactac

SEQ ID NO: 32607 - DNA, 1434 bp, synthetic construct
  misc_feature 1..1434: note = Description of Artificial Sequence: Synthetic coding sequence
  source 1..1434: mol_type = other DNA
atggatcgatcactggggtggcaggggaattcggtacctgaagataggacggaagcgggcatcaagaggtttctggaagataccacagatgacggtgagctatcaaaattcgtgaaagatttttcaggtaacgcttcatgccatccgccagaggcaaagacgtgggccagcagaccccaggtcccagagccacggcctcaagcgccagacctgtatgacgacgatctcgaattcagacctccgagcaggccgcagtcctcagataatcagcaatacttctgtgccccggcaccgttgagcccatccgctaggcctcgctctccatggggtaaactggatccctacgatagtagcgaggatgacaaggaatatgtgggcttcgctacactccctaatcaggtgcatcgaaaatcggtcaaaaagggcttcgactttactctcatggtggccggtgagagtgggctcggcaagtctaccttggtgaactccctgttcctgacagatctgtacagggacagaaaactcctcggcgccgaggagcgaatcatgcaaactgtcgagattaccaagcacgctgtcgatatcgaagagaagggcgtgcggctgcggctgacaatcgtggacacccctggtttcggggatgcagtcaataacaccgagtgttggaagccagttgctgaatatatcgatcagcagtttgagcagtacttccgcgacgagtccggactgaatagaaagaacatccaggataatagagtacattgttgtctgtacttcatatccccatttgggcatggcctgcgacctcttgacgtggagttcatgaaggccctgcaccaaagggtgaatatcgtgcccatccttgcaaaggctgacactttgacgccaccggaggtcgatcataagaagcggaaaattcgggaggaaatcgaacacttcggaatcaagatctaccaatttcccgactgcgactctgacgaggatgaagatttcaagctccaagatcaggccttgaaagagagtatcccttttgctgtcattggctctaacaccgtcgtcgaagctcgaggtcgacgcgtgcgcggaagattgtacccttggggaatcgtagaagtcgaaaaccccgggcattgtgattttgttaagttgcggacgatgttggtacggacccacatgcaagatctcaaggatgtgaccagagagacgcactatgagaactaccgagcccagtgcatccagagcatgactcgcttggttgtgaaagaaaggaatcgaaataaactgacaagggagagcggaactgatttccctatacctgccgtccctcccggaactgatcccgaaacggagaaactgatcagggaaaaagatgaggagttacgaaggatgcaggagatgcttcataagatccaaaaacagatgaaggaaaactat

SEQ ID NO: 32608 - DNA, 1434 bp, synthetic construct; identical to SEQ ID NO: 32599
  misc_feature 1..1434: note = Description of Artificial Sequence: Synthetic coding sequence
  source 1..1434: mol_type = other DNA

SEQ ID NO: 32609 - DNA, 1434 bp, synthetic construct
  misc_feature 1..1434: note = Description of Artificial Sequence: Synthetic coding sequence
  source 1..1434: mol_type = other DNA
atggaccgatcgctgggatggcagggaaatagcgtgccagaggataggaccgaagctggaatcaaacggtttcttgaagatactactgatgatggcgaactttccaagttcgtgaaggatttttccggaaacgcctcatgtcatcccccagaggcaaagacctgggcctcccgcccacaggtgcctgagcctcggccacaagctcctgatctgtacgatgatgacctcgaatttcggcctccatcacgcccccagtccagcgataatcagcaatacttttgtgcacctgcccctctgtctccaagtgcccgaccaaggtcgccctggggaaagttggacccttacgatagcagcgaggatgataaggaatacgtgggcttcgcaactttgcctaaccaagttcatagaaagtccgtgaagaagggttttgactttacccttatggttgcaggggagtcggggctggggaagtccacccttgtgaatagcttgttccttaccgacctctatcgggatcggaaactccttggtgcggaagaaagaattatgcaaacggtggaaattaccaagcatgccgtggacatcgaagaaaagggggtgagactccggttgactattgtcgatactcccggtttcggtgatgccgtgaacaacacggaatgctggaagcccgtggcagaatacattgaccaacaatttgaacagtactttagggatgaatcgggtcttaaccgcaaaaacatacaggacaaccgggtccattgttgcctgtactttatcagccctttcggacatggtctgcggccgctggacgtggagtttatgaaggccctccatcagcgagtgaatatagtccctattctcgcaaaggcagataccctgaccccacctgaagtggaccataagaagcgcaagattagggaagaaattgagcatttcggaatcaagatttaccagttcccagattgtgacagcgatgaagatgaggatttcaaactccaagatcaagcgcttaaagaatcgattccatttgccgtcattggctcaaataccgtggtggaagcacgggggagaagggtcaggggacggctgtatccttggggtattgtggaagtggagaaccctggccattgtgatttcgtgaaattgcgaacgatgcttgtgagaactcatatgcaggatctcaaggatgtcaccagggaaactcactacgaaaactacagggcccaatgtatacaatcgatgacgcgtcttgtggtgaaggagaggaacagaaacaagctgacccgagaatcgggaacggacttccctatacccgctgtccctcctgggaccgaccccgagactgagaagctgattcgtgaaaaagacgaggaactgcggcgtatgcaggaaatgttgcacaagatacagaaacaaatgaaggagaactac

SEQ ID NO: 32610 - DNA, 1434 bp, synthetic construct
  misc_feature 1..1434: note = Description of Artificial Sequence: Synthetic coding sequence
  source 1..1434: mol_type = other DNA
atggatcgtagcctgggatggcaggggaacagtgtacccgaggacagaactgaagcaggaatcaagcggtttctggaagacacaacggatgatggggagctgagcaaattcgttaaggatttcagtggtaacgcctcttgtcacccccccgaagctaaaacttgggctagccgaccacaggtgccagaaccacggccccaggcacccgacctttacgatgatgatctagaatttagacccccctctcggccccagagctcagataaccagcagtacttttgcgcccccgctcctctgtctccatctgcccgtcctcggtctccctggggaaagctcgatccgtacgactcgtctgaggatgataaagaatacgtaggctttgcaaccttgcccaatcaggtgcaccgtaagtcagttaaaaaaggcttcgattttaccctcatggtcgccggagagtcaggattaggaaagtcaacactggttaatagcctgttcctgaccgatctttatagggatagaaaactgttaggcgccgaagaacgaataatgcagactgttgaaattactaagcacgccgtggatattgaggaaaaaggcgtccggctgcgcctcaccatcgtggacactccggggtttggcgatgctgttaataacaccgaatgttggaaaccagtggcggagtacattgaccaacagttcgaacagtatttccgagacgaaagtggtctcaaccgaaaaaatattcaggataatcgggtgcattgctgcctgtatttcatcagcccgtttggccacggcctaaggcccctggacgtggagttcatgaaggctctgcaccagcgagtgaacattgtacccattcttgcaaaggctgacacccttactccacccgaggtcgatcataaaaaaaggaaaatcagagaggaaattgagcactttggtatcaagatttaccaattcccggactgcgactctgatgaagatgaggatttcaagctgcaggaccaagccctcaaagaatcaattccctttgctgtgatcggctcaaacactgtcgtggaggcaagaggcaggagagtgagggggcgcttgtacccatggggtatcgtcgaagttgagaaccccggccattgtgattttgtaaagctcagaactatgctagtgcgcactcacatgcaggatcttaaggacgtcacccgggagactcactacgagaattaccgcgcacagtgtattcagtcaatgactcggctggtggttaaggagcgcaacagaaataaactcacccgcgagtctggtactgacttccctatacctgctgttcccccagggaccgatccagagaccgaaaagctaattcgagagaaggacgaggagctgaggagaatgcaggagatgctccataagattcagaagcagatgaaggagaattat

SEQ ID NO: 32611 - DNA, 1434 bp, synthetic construct
  misc_feature 1..1434: note = Description of Artificial Sequence: Synthetic coding sequence
  source 1..1434: mol_type = other DNA
atggacaggagcctgggatggcaaggtaattccgtgcctgaggataggaccgaggcaggaattaagcggttcttggaagataccaccgatgacggcgaattgtcgaagttcgtcaaggactttagtggtaatgcatcatgtcatcctccagaagcgaaaacttgggcatcaaggccacaggtgcctgagccacgcccgcaagccccagatctctatgatgatgatttggaattcagaccaccctcaagaccacaatcgtcggacaaccagcaatacttttgcgcgcctgcacccctttccccctccgccaggccacgcagcccttggggcaagctggacccgtatgattcatcggaggatgataaggaatacgtgggatttgcaacccttcctaaccaggtgcatcggaagagcgtgaagaaggggttcgactttacgctgatggtggcaggtgagagcggactcggcaaatcaaccctggtcaactcactttttctcactgatctgtatagggacagaaaacttcttggagcagaggaaagaatcatgcaaaccgttgagatcactaagcacgcagtggatatcgaagagaaaggagtgcgacttagacttaccattgtcgatacccccggattcggtgatgcggtcaataacactgaatgctggaagccagtagcagagtacatcgatcagcagttcgaacaatactttcgagatgaatctggtcttaaccgcaagaatatccaagataaccgcgtgcattgttgtctctacttcattagtccctttggacacggattgcgcccacttgatgtggaattcatgaaggccctccaccagagagtcaatatcgtgccaattctggcaaaggcggatacccttacccctcccgaagtggatcataagaagcgtaagattcgcgaggagattgaacactttggtatcaagatttaccaatttcctgactgtgatagcgacgaggatgaggactttaaacttcaagatcaagcccttaaagaatccataccattcgcagtcatcgggtccaacactgtcgtggaagcacgcggtcggagggtgagagggcgactgtacccctggggcattgtggaagtggaaaaccccggacactgcgactttgtgaaacttagaacgatgctggtgcgcactcatatgcaagatctgaaagatgtgactagagaaacccattacgagaattacagggcacaatgtatccaatcgatgactcgcctggttgtcaaggaacgaaacaggaataagctgacgagggaatctggcactgattttccgatcccagcagtccctcctggtaccgatccggaaactgagaagttgattcgggagaaggacgaagagctgcgaagaatgcaagaaatgctgcacaaaatccagaagcagatgaaggaaaactac

SEQ ID NO: 32612 - DNA, 1434 bp, synthetic construct
  misc_feature 1..1434: note = Description of Artificial Sequence: Synthetic coding sequence
  source 1..1434: mol_type = other DNA
atggatcgcagcctgggatggcaggggaatagcgttccagaggacaggaccgaagccggaattaaacggtttctggaggacactacagatgatggggagctgtccaagttcgtgaaagatttctctggtaatgccagttgccacccaccggaggctaagacatgggcttcacggccccaggtgcccgagcccaggccgcaggcacctgatctgtacgacgatgacctggaattccgtccaccgagtcgcccgcagtctagtgataatcagcagtatttttgtgctcccgcccccctgtcaccttccgccagacccagatccccctggggcaaactggacccatacgattcttccgaagacgataaagagtacgttgggttcgccactctgcctaatcaggtccaccggaagtctgtgaagaaaggttttgacttcacacttatggtagctggtgaatccggcctgggcaaaagcactttagtgaattcgctcttcctgaccgacctctacagagaccggaagctcctgggagcagaggagaggattatgcagaccgtggagatcaccaagcacgcagtggacattgaggaaaagggcgtgcgcctgagactaaccatagtggatactcccgggtttggcgatgccgtcaacaacactgagtgctggaaacccgttgcggagtatattgatcagcagtttgagcaatattttagggatgagtcaggactgaaccggaagaatattcaggataatcgggtgcattgttgcttgtacttcatctcacccttcggtcatggcctgagaccactcgatgtggagtttatgaaggcgctacaccagcgagtcaatatcgtgcctatactggcaaaggccgataccctgacacccccggaggtggatcataagaagagaaagatccgggaggaaatcgaacattttggaattaagatctaccagttcccggactgcgattctgacgaggacgaagattttaagctgcaggaccaggctctgaaggaaagtatccccttcgccgtgattgggtccaacaccgtggttgaggccaggggcaggcgcgtcagagggcggttgtatccgtggggaatagtggaggtagaaaatcccgggcattgcgacttcgtgaagcttcgtaccatgctggtgagaactcatatgcaggacctcaaggatgtgactcgagagacgcattacgaaaactacagggcgcagtgtattcagagcatgaccagactggtggtaaaagagcgaaacagaaacaagttgacccgagagagcggaacggactttcctatacccgccgtcccaccaggcaccgaccctgagaccgaaaaactaatacgagagaaagacgaggagctcaggcggatgcaagagatgttgcacaaaattcagaagcagatgaaagagaactat

SEQ ID NO: 32613 - DNA, 1434 bp, synthetic construct
  misc_feature 1..1434: note = Description of Artificial Sequence: Synthetic coding sequence
  source 1..1434: mol_type = other DNA
atggatagatcactcgggtggcagggaaactccgtgcccgaggatcgaactgaggccggcataaaacgatttcttgaggatacgaccgacgacggggaacttagcaaatttgtcaaagatttttccggaaatgcgtcctgtcaccccccagaggcaaaaacctgggcaagcagacctcaagtgccagaacccagaccgcaggcacctgacctgtacgatgacgatctggaatttcgcccgccttcgcgtccacaaagctcagacaaccagcaatacttttgtgcaccagcgcctctttcaccctccgctagacccagatcaccatggggaaagctggatccttacgatagctcggaagatgataaagagtacgttggatttgccaccctgccaaaccaggtgcacagaaagtctgtcaagaaaggttttgattttaccctgatggtggcaggagaaagcggtcttgggaaatcgacccttgtgaactcgctgtttctgactgatctgtacagagatcgaaagctgcttggagccgaagagcgcattatgcaaaccgtcgaaatcaccaagcatgcagtggatatcgaagagaagggtgtccgacttcgcctgacgattgtggatactcctgggtttggagatgcagtgaataacaccgaatgttggaagcctgtcgcagaatacattgaccaacagtttgaacaatacttccgtgacgaaagcggattgaaccgaaagaatatccaggacaatcgtgttcattgctgtctctactttatctcgccattcggacatggccttcgtccactcgatgtggagttcatgaaggcacttcatcaaagagtcaacatcgtccccattctggcaaaagcagataccctgactccacccgaagtggatcataagaagcggaagattcgggaggaaattgaacattttggaataaagatctaccagtttccagattgcgattcggatgaggacgaggatttcaaactgcaagatcaggctcttaaggaaagcattccatttgctgtgatcggctctaacacggtggttgaggcaagaggcagacgtgtgcgcggaaggctgtacccgtggggcattgtcgaagtcgaaaatcccgggcactgtgactttgtgaagctccgtaccatgctggtgcgcactcatatgcaagaccttaaggatgtgactcgagagactcactacgagaattaccgtgcacagtgcatccagtcgatgactagactcgtggtcaaagaacggaaccgaaacaagttgactagagagtcgggaaccgattttcccattccagcggtgccgcccgggactgaccctgaaacggaaaagctgattcgcgaaaaggatgaggaactgcgccgaatgcaagaaatgcttcataagattcaaaaacagatgaaggaaaactat

SEQ ID NO: 32614 - DNA, 1434 bp, synthetic construct
  misc_feature 1..1434: note = Description of Artificial Sequence: Synthetic coding sequence
  source 1..1434: mol_type = other DNA
atggataggtcgctcggctggcagggcaacagcgtgcccgaggaccgcactgaagctgggataaaacgctttctagaggataccactgacgacggtgagctgtccaaatttgtgaaagacttcagtgggaacgcctcatgtcaccccccagaagccaaaacgtgggctagccggccccaggtgccggaaccacgcccgcaagcgccggacctgtacgatgacgaccttgaattccggccaccctcccggccccagagtagtgacaaccagcagtatttttgcgcgccagccccattaagcccatctgccaggcccagaagcccttggggcaaactggatccctacgattcttccgaagacgataaggaatacgtgggcttcgcgaccctgccaaatcaggtgcatcggaagtccgtgaagaaaggcttcgacttcacactgatggtagcaggcgaaagcgggctgggaaaatccacgctggtgaattctctgtttctgactgatctgtaccgcgatcgcaaacttctgggcgcagaagagaggattatgcaaaccgtcgaaatcacaaagcacgcggttgacattgaggaaaagggtgttcgccttcgcctcactatcgtagatactcctggatttggggacgctgtcaacaatactgagtgttggaagcccgtggccgagtatatcgatcaacagttcgaacagtactttcgcgatgagtccggactcaaccgcaaaaacatacaagacaatcgcgtccactgttgtctgtattttatttctccttttggacatggcttacgtcctctggacgtggagttcatgaaagcattacaccaaagggtgaatatagttcccatcctggccaaagcagatacactgaccccccccgaggtcgaccacaaaaagaggaagatccgggaggaaatagagcatttcggcattaaaatctatcagtttcccgattgtgatagcgatgaggatgaggacttcaaactccaggatcaggcactaaaggagtccatcccttttgccgtcataggttctaacactgtggtcgaggcacgggggcggagagtcagaggtcgcttgtacccgtgggggattgtggaggtagaaaatccggggcattgtgattttgtcaaactacgtacaatgttagtccggactcatatgcaggacttgaaagacgtgacaagagaaacccactacgagaattaccgggcccagtgtatccagagcatgacgcggcttgttgtaaaagagagaaacagaaacaagctgacccgggagagcggtaccgattttccgattccggcagttcctccgggaaccgacccagaaacagaaaagctcatcagagagaaagacgaagagcttcggcgcatgcaggagatgttgcataaaattcaaaagcagatgaaagagaattat

SEQ ID NO: 32615 - DNA, 717 bp, synthetic construct
  misc_feature 1..717: note = Description of Artificial Sequence: Synthetic coding sequence
  source 1..717: mol_type = other DNA
atggctgcccttaaatcttggctgtcacgcagtgtcacatctttctttcggtacagacagtgcctttgtgtgccagtggtagccaatttcaaaaagaggtgcttttccgaactcattcgcccctggcacaaaaccgtgactattgggtttggcgtgaccctttgcgcagtccctatcgcccagaaaagtgagccacatagcctgtcctccgaagcgttaatgagacgggccgtaagcttggttactgattcaacgagtacattcctcagtcagacaacctacgctttgatcgaagcaatcaccgagtacactaaggctgtgtacaccctcacctctctgtatcggcagtacactagcttgctggggaagatgaatagcgaagaggaggatgaggtgtggcaggtgattatcggagcccgggcggagatgacgagtaaacaccaagaatacttgaagctagaaacaacctggatgacagctgttgggctctcggagatggcagcagaagcggcttaccagaccggcgctgatcaagcctctatcacagcacgcaatcacattcagttggtgaaactgcaggtggaggaggtacaccagctgagcaggaaggccgagacaaagctcgcggaggcccaaattgaggagctcagacagaagactcaggaagagggggaggagcgcgctgaaagtgaacaggaggcgtacctgcgagaagat

SEQ ID NO: 32616 - DNA, 717 bp, synthetic construct
  misc_feature 1..717: note = Description of Artificial Sequence: Synthetic coding sequence
  source 1..717: mol_type = other DNA
atggccgctctcaaaagttggttatctcgctctgtgacaagtttctttagatatcggcaatgtctctgcgttcctgtagtcgccaacttcaaaaaacgctgcttctccgaacttatacggccatggcataaaactgttactatcggattcggagtgacactgtgcgcggtgcccatcgcacagaagagtgaaccacattccctttcatccgaagctctgatgaggagagctgtatcccttgttacagactctacttctacatttctgtctcagactacatacgcccttatcgaagccatcactgagtatacaaaagctgtatacacgctgacatccctatatcggcagtatacttcgctgctcggaaagatgaattccgaagaagaagatgaagtatggcaggtcatcataggagccagggctgagatgacttctaaacatcaggaatatctgaaattagaaacaacttggatgacggcagtagggttatctgaaatggcagcagaagccgcatatcagacaggagcggatcaggctagtataactgctagaaatcacatacaactggtcaagttgcaggtcgaagaagttcatcagctatcacggaaagcagaaactaaactggctgaagctcaaattgaagaactcaggcaaaaaacacaagaagagggagaagaacgagcggaatcagaacaagaagcgtatctacgggaggat

SEQ ID NO: 32617 - DNA, 717 bp, synthetic construct
  misc_feature 1..717: note = Description of Artificial Sequence: Synthetic coding sequence
  source 1..717: mol_type = other DNA
atggcggcactcaagtcttggctgtcacgctcggtgacttccttcttccggtatagacagtgcctgtgtgtgcccgtggtggctaatttcaaaaaacgatgcttctccgaattgatcaggccgtggcacaagactgtcaccattggatttggcgtgactctttgcgcggtgcccatcgcccaaaagtcagaaccacattccctgtcatccgaggcacttatgaggcgcgcggtgagcctcgttaccgactccacgtccaccttcctctcgcaaactacctacgcactcatcgaggcaatcaccgagtacaccaaagctgtgtacactctcacttcactgtatcggcagtacacctcgctgctggggaagatgaacagcgaagaagaagatgaggtctggcaagtgatcatcggggcaagagcggagatgacctccaagcaccaggaatacctgaagctcgaaactacttggatgaccgccgtgggactttccgaaatggccgcagaggctgcctatcaaaccggagccgaccaggcctcgatcaccgcccggaaccacattcagttggtgaagctgcaggtggaagaggtccaccagctgtcccgcaaagcagagactaagctggcagaagcccagatagaagagttgcggcagaaaacccaggaggaaggagaagagagagcggaatccgagcaggaagcatacctcagagaggat

SEQ ID NO: 32618 - DNA, 717 bp, synthetic construct
  misc_feature 1..717: note = Description of Artificial Sequence: Synthetic coding sequence
  source 1..717: mol_type = other DNA
atggccgctctcaaatcctggttgagtcggtcggtgacctctttctttcgctatcggcagtgtctgtgtgtaccggtggttgcgaatttcaagaaaagatgcttttcagaacttataagaccatggcataaaactgtgactatcggctttggggtgactctgtgtgccgtgcctattgcgcagaagagcgaacctcattctctgagctccgaggcactcatgcggagagccgtgtctctcgtgactgacagcacctctacgtttctcagccagactacgtatgcccttatcgaggcaattacagagtacactaaggcggtgtacaccctcacctccctttaccgccagtacacatctctgttaggaaaaatgaattccgaagaggaggacgaggtctggcaggtgataatcggcgcccgggccgagatgacatctaaacaccaagagtacctaaaactggaaaccacctggatgacggcggtggggctctccgagatggccgcggaggccgcataccagaccggggcagaccaggctagtatcaccgcgcgcaatcacatccagctagtgaaactgcaggttgaagaggtacatcagctgtcccggaaggctgagaccaagctcgccgaagcccagattgaggagcttaggcagaagacccaggaggaaggagaggaaagggctgagagtgagcaagaagcctatctcagagaggat

SEQ ID NO: 32619 - DNA, 717 bp, synthetic construct
  misc_feature 1..717: note = Description of Artificial Sequence: Synthetic coding sequence
  source 1..717: mol_type = other DNA
atggcagcccttaagtcctggctgtcccgttccgtgacctcgtttttcagatacagacaatgtctttgtgtgccagtcgtggcgaactttaagaagcgatgcttctcggaactgatacgcccatggcataagaccgtgactattggttttggtgtgaccctctgtgcggtgcctatcgcacaaaagagcgaacctcattcgctgtcctcagaagccctgatgcgcagagcagtgtcacttgtcaccgatagcacgtcgacttttctgagtcaaacgacttacgcgctcatagaagccatcaccgagtatactaaggccgtgtacactctgacttcactttaccggcagtacacctcactgctcggaaagatgaactccgaagaagaagatgaagtgtggcaagtgattattggtgcacgggcagaaatgacttcaaaacatcaagaatacctgaaactcgaaactacttggatgaccgcagtggggcttagcgaaatggctgcagaagcagcataccagacgggggcagatcaagcgtcaattaccgctcggaatcatatccagctcgtgaagctccaagtggaagaagtccatcagctctcaagaaaggcagagactaagctcgcagaggcgcagatcgaggagttgcgtcagaaaacccaagaggaaggagaagagcgcgcggagtctgaacaagaggcatacctccgagaagat

SEQ ID NO: 32620 - DNA, 717 bp, synthetic construct
  misc_feature 1..717: note = Description of Artificial Sequence: Synthetic coding sequence
  source 1..717: mol_type = other DNA
atggcagcactcaagtcctggctgagccggagcgtgaccagttttttcagataccgccaatgtctgtgcgtgccagtggttgccaactttaaaaagcgctgtttcagcgagctgatccgcccttggcataagaccgtcactattggctttggggtgactctttgtgcagtgcctattgcccagaagtcagaacctcatagccttagcagtgaggccctgatgaggcgcgccgtgagcctcgtgaccgactccactagcaccttcctttctcaaacgacctacgctctcatcgaggccattacagagtatacaaaagccgtgtacaccctcacgtccctgtacagacagtacacgagcctgctcggcaagatgaatagtgaggaagaagacgaggtatggcaggtgattatcggagcccgggccgagatgacttccaaacatcaggagtatttgaagctcgagaccacatggatgaccgcggtgggtctcagtgagatggctgccgaggcggcttatcagaccggtgctgaccaggcctccatcacagcaaggaatcacatccaactggtgaaacttcaagttgaggaggttcaccagctctcaaggaaagccgagacgaagctggcagaggctcagatagaagagctgaggcagaaaacccaagaagaaggagaagaaagagcggagtccgagcaagaggcctatctccgggaggat

SEQ ID NO: 32621 - DNA, 717 bp, synthetic construct
  misc_feature 1..717: note = Description of Artificial Sequence: Synthetic coding sequence
  source 1..717: mol_type = other DNA
atggctgcccttaaatcatggctgtccaggtccgtgactagcttctttaggtatcgccaatgcctgtgtgtcccagtcgtcgccaacttcaagaaaaggtgcttcagcgagctgattagaccatggcacaaaacagtaaccatcggctttggagttacactttgtgccgttccaatagctcagaagtcagaacctcacagtctgtcttctgaagccctgatgcgcagggctgtatctctggtgaccgactcaaccagcacttttttgtcccagaccacttatgcactgattgaggccatcacagagtacacaaaggctgtgtacaccttgacttccctctaccgtcagtacacttccctcctcggtaagatgaattccgaggaggaggacgaagtgtggcaggtgatcattggtgcaagagccgagatgactagtaagcatcaggagtatcttaagcttgagactacttggatgaccgcagtgggtttgtctgaaatggctgcagaggccgcctaccaaaccggagctgatcaagcctcaattaccgctcgtaaccatattcagctcgtgaagctccaagtggaggaagtccaccagctgagcaggaaagcagagaccaagttggctgaggcacagatcgaggagttgagacagaaaacccaggaggaaggcgaagagagagcagagtctgagcaggaggcttatctcagggaagat

SEQ ID NO: 32622 - DNA, 717 bp, synthetic construct
  misc_feature 1..717: note = Description of Artificial Sequence: Synthetic coding sequence
  source 1..717: mol_type = other DNA
atggccgctttgaagtcgtggctctctcggtctgtgacctctttttttcggtaccggcagtgtctttgcgtgccggtggtcgcaaacttcaaaaagcgttgctttagcgagcttattcgaccatggcacaagaccgtgactatcggctttggcgtgaccctttgcgcggtccctattgcacagaagagtgagcctcactccttgtcatcagaagctctcatgcgtcgggcagtcagcttggttacagactcaacgagtacattcctgagccagacaacatatgccctaatcgaggcgattacagagtatacaaaggccgtgtacaccctaaccagtctctaccggcagtatacttcgctgctggggaaaatgaattcagaggaagaagatgaagtttggcaggtaattattggagctcgcgccgaaatgacgtccaaacatcaggagtaccttaagttagagacaacctggatgactgcagtcggcctgtcagaaatggccgccgaggctgcttaccagaccggcgctgatcaggctagcataacagcgcggaaccacatccagctcgttaagttacaggtggaagaggtccaccagctcagcaggaaagctgagaccaaactggctgaggcccaaattgaagaacttcggcagaaaacacaggaagagggtgaggaacgggcagagtccgaacaggaagcatacctgcgcgaggat

SEQ ID NO: 32623 - DNA, 717 bp, synthetic construct
  misc_feature 1..717: note = Description of Artificial Sequence: Synthetic coding sequence
  source 1..717: mol_type = other DNA
atggccgctctcaaatcctggctgtcgcgctcagtgacttcgtttttcagatacagacagtgcctgtgcgtgccggtcgtggcgaacttcaaaaagcgctgcttcagcgaattgataagaccatggcacaaaaccgtcaccatcggattcggagtgacgctctgcgccgttccgattgcccaaaagagcgagcctcatagcttgtcctcggaggctctgatgaggagagctgtgtccctcgtgactgattctaccagcaccttcttgtcgcaaaccacctacgccctgattgaagccatcacggaatacactaaggccgtgtacactctgacctccctgtaccggcagtacacttccctcctgggaaaaatgaactcagaagaggaagatgaagtgtggcaggtgattattggggcccgcgccgaaatgacgtccaaacatcaggagtacctgaagttggaaaccacttggatgactgcggtcggactgagcgagatggccgctgaggccgcgtaccaaaccggcgcagaccaggcatccatcaccgcacggaaccacatccaactggtcaaactgcaggtggaggaggtgcatcaactcagccgcaaggccgagactaaactcgcggaggcccagatcgaagagctccggcaaaaaactcaggaagaaggcgaagaaagggcagagtcggaacaggaagcctacctgagggaagat

SEQ ID NO: 32624 - DNA, 717 bp, synthetic construct
  misc_feature 1..717: note = Description of Artificial Sequence: Synthetic coding sequence
  source 1..717: mol_type = other DNA
atggccgctttgaagagctggcttagcaggtccgtgacttcattcttccgatataggcagtgtctatgcgttcccgtagtggctaacttcaagaaacggtgcttcagtgaactcatcagaccatggcacaagacagtgacaataggttttggagtcaccctctgcgccgtccccattgcccagaagtccgagccgcacagcctgtctagtgaggccctgatgagacgtgcggtgtcactcgtgacagattctacctcgacatttctgtctcagaccacatacgcgctcatcgaagccattaccgagtataccaaagccgtatacactctcaccagtctgtatcggcaatatacttccctcctcggcaaaatgaactccgaggaggaggacgaggtgtggcaggtaatcatcggggctagggccgagatgacttcaaagcaccaggagtacctgaaactagaaactacgtggatgactgctgtgggcctatctgagatggcagcagaggccgcatatcagactggggcagaccaggcctccatcacggcaagaaaccatatccagctggtgaagttgcaggtggaggaggttcaccagctgtcaagaaaggcggagacaaaactagccgaggctcagattgaagagctgcgccagaagacacaagaggagggcgaggagcgcgcagagagcgagcaggaggcatatctgcgagaggat

SEQ ID NO: 32625 - DNA, 717 bp, synthetic construct
  misc_feature 1..717: note = Description of Artificial Sequence: Synthetic coding sequence
  source 1..717: mol_type = other DNA
atggcagccctgaaaagctggctgtcccgaagcgttacgtctttttttcgctatcgtcaatgtctgtgtgtgccagtagtggctaactttaaaaagcgctgcttctcagagctgatccgcccgtggcacaaaaccgtcaccataggctttggtgtcaccctctgtgctgtccctatcgcgcagaagtctgagccccactcactctctagcgaggcactgatgagacgtgcggtgagcctggtgacggattctactagcacctttctgtcccaaaccacctacgccttgatcgaagccatcaccgaatatacgaaggcagtgtatacactgacgagcttgtacaggcagtacaccagcctgctcgggaaaatgaatagcgaggaagaggacgaggtctggcaagtcataataggcgcccgtgccgagatgacaagcaagcaccaggagtacctgaaactggagaccacgtggatgaccgcggtgggcctcagcgagatggctgcggaagctgcttatcagacaggcgctgatcaggcgagcatcaccgcgcgcaaccatatccaactggtgaaactgcaggtggaagaagtgcaccagctttcaaggaaagccgaaaccaaactggctgaggcccaaattgaagaactccgccagaaaactcaagaggaaggtgaggagcgggcagagagcgagcaggaagcctatttgcgggaagac

SEQ ID NO: 32626 - DNA, 717 bp, synthetic construct
  misc_feature 1..717: note = Description of Artificial Sequence: Synthetic coding sequence
  source 1..717: mol_type = other DNA
atggcggccctgaaatcatggctcagccgtagcgtcacgtccttcttcagatacaggcagtgcctgtgcgtcccagtggtggcgaactttaagaagcgctgctttagcgaacttatcaggccgtggcataaaactgtgactattggatttggggtgacgctgtgcgccgtcccgatcgctcagaagtccgaaccacattcactgtcatcggaggcccttatgcggcgggcggtgtcgcttgttacggactccacttccaccttcctgtcacaaaccacctacgcactcatcgaggctattaccgaatacactaaggcagtgtacaccttgaccagcttgtaccggcagtacactagcctgctgggcaagatgaattccgaggaagaggatgaagtctggcaagtcatcatcggagcacgggccgagatgacttcgaaacaccaggagtacttgaaactggaaaccacgtggatgactgcagtcggactgtccgagatggccgcagaagccgcataccaaaccggagccgaccaggcctccatcaccgcccgaaaccatattcaattggtgaaactgcaggtggaggaagtgcaccagctctcgagaaaggcggagactaaacttgcagaggcccagatcgaagaactgcggcaaaagacgcaagaggaaggtgaagaaagggctgagtctgagcaggaggcctatctcagagaagat

SEQ ID NO: 32627 - DNA, 717 bp, synthetic construct
  misc_feature 1..717: note = Description of Artificial Sequence: Synthetic coding sequence
  source 1..717: mol_type = other DNA
atggcagccctcaagagttggttgagccggtccgtgacatcctttttcaggtataggcagtgcctttgcgtacctgtggtggcgaacttcaagaagcgttgtttctctgaactgatcaggccttggcacaaaacggtgaccatcggtttcggagttaccctatgcgctgtacccatcgctcaaaagtccgagcctcattccctgtcttcagaagctcttatgagaagagctgtttcgctcgtgaccgatagtacctctacctttctttcccagacaacatatgcactaatcgaggctattacagaatacaccaaggccgtttatactctcacaagtctctacaggcagtatacctcgctcctgggtaaaatgaattctgaagaggaagacgaagtctggcaagtgattattggcgcccgggccgaaatgacaagcaaacatcaggaatatctgaagctggaaaccacttggatgaccgccgttgggcttagcgagatggcggccgaagctgcatatcaaaccggagccgatcaggcgagcataacagcgcgcaaccacattcaactggtgaagctccaggtggaggaggtccaccagctgagcaggaaggctgaaacaaagctagcagaagcacaaatagaggagttacgacagaagacacaagaagaaggagaggagagggccgagtccgaacaggaggcctacctgagggaagac

SEQ ID NO: 32628 - DNA, 717 bp, synthetic construct
  misc_feature 1..717: note = Description of Artificial Sequence: Synthetic coding sequence
  source 1..717: mol_type = other DNA
atggcagcgctgaagagctggctctcaagatcggtgactagcttcttccgctacaggcaatgcctgtgcgtcccggtcgtggccaacttcaaaaagcggtgcttttcggagctgattcgcccttggcacaaaaccgtcaccatcggatttggagtgaccctgtgcgccgtgcccatcgcccagaaatcggaaccgcacagcctctcgagcgaggctcttatgagaagagcagtgtcgctggtgaccgactccactagcaccttcctgtcgcagaccacctacgcgctcattgaagccatcaccgaatacactaaagcagtgtataccctcaccagcctgtaccggcagtacacttcgctcctgggaaaaatgaattccgaggaagaggacgaagtatggcaagttatcattggcgcccgcgccgaaatgacctcaaagcaccaggaatacctcaaactcgagactacgtggatgactgcagtgggcctgagcgagatggctgccgaagccgcctaccagaccggggcagatcaggcgagcatcacggcccgaaatcacattcaacttgtgaagctgcaagtcgaagaagtccatcagttgtcaaggaaggccgagactaagttggccgaggcccagatcgaggaactgcgccaaaagactcaggaggagggagaggaacgggccgagagcgaacaggaggcttacctccgggaggac

SEQ ID NO: 32629 - DNA, 717 bp, synthetic construct
  misc_feature 1..717: note = Description of Artificial Sequence: Synthetic coding sequence
  source 1..717: mol_type = other DNA
atggctgcattgaaatcatggctgtcacggtccgtgacttccttttttcgctacagacaatgtctgtgtgttcctgtcgtcgcaaacttcaaaaagcgatgtttttccgaactgattaggccatggcataagactgtgaccatcggctttggagtcactctgtgtgcggttccaatcgcccaaaagagcgagccgcactccctttcgtcagaggccctcatgagacgagccgtgtccctggtcactgattccactagcaccttcctgtcccagaccacctacgcacttatcgaagccatcaccgaatataccaaggcggtctataccctgacctccctttaccgccaatacacgagccttctcggaaaaatgaattcggaagaagaagatgaggtctggcaagtgattatcggcgcccgagctgaaatgactagcaagcatcaggaatacctcaagctcgaaaccacttggatgaccgcagtgggcctgagtgaaatggcagcagaagcagcttatcagactggagccgaccaggcgtcaattactgctcggaatcacatccagctggtgaaactccaagtcgaagaagtgcaccagctgagccgcaaggcggaaaccaagctggcagaggcacaaattgaggagcttagacaaaagacgcaggaagagggagaggaacgcgcagagtcggaacaagaagcatacctgcgggaggac

SEQ ID NO: 32630 - DNA, 717 bp, synthetic construct
  misc_feature 1..717: note = Description of Artificial Sequence: Synthetic coding sequence
  source 1..717: mol_type = other DNA
atggcggctctgaagtcttggctctctaggtcagtgactagtttcttccgctatcgccagtgtctgtgcgtgccagtggtggcaaacttcaagaaaaggtgtttttccgagcttatccgcccatggcataagaccgtcacaatcggttttggcgttactctctgtgctgtgccaattgcacaaaaatcagaaccacacagcctgagctctgaggccctgatgaggagggccgtctctttggtcacggattctacctccactttcctgagtcagaccacatatgctcttatcgaggccatcaccgagtatactaaagccgtctacacgctgacctctctgtacagacagtatacctcactgctgggaaagatgaatagcgaggaggaggatgaggtctggcaagtgatcatcggagccagagccgaaatgacctctaaacatcaagagtacttgaaattggaaacaacatggatgaccgcggtaggactgtctgagatggcggccgaagctgcctatcagaccggcgcggaccaggccagcattaccgcaaggaaccatattcagctcgttaagctccaagtggaggaagtgcatcaactgtccagaaaggcggaaacgaaacttgcggaagcacagattgaggaacttcgccaaaagacgcaggaggagggagaagagagggccgagagcgaacaggaagcttacttgagagaggat

SEQ ID NO: 32631 - DNA, 717 bp, synthetic construct
  misc_feature 1..717: note = Description of Artificial Sequence: Synthetic coding sequence
  source 1..717: mol_type = other DNA
atggccgcacttaaatcgtggctgtccaggtcagtgacctccttctttagataccgacaatgcctttgtgtgccggtggtcgcaaactttaagaaacgctgtttctcggagttgataagaccttggcataagaccgtgactataggcttcggagtcaccctttgtgcagtgcctattgcacagaagtcagagcctcactcgctctcgagcgaggccctcatgcggagagccgtgtcgcttgtcactgactcgacctcaaccttcttgtcccaaactacctatgccctcattgaagcaatcactgaatacactaaggcagtgtataccctcactagcctctaccggcaatacactagcttgcttgggaaaatgaactctgaggaagaagatgaagtgtggcaggtgatcattggggcacgcgcagaaatgacgagcaagcatcaggaatacctcaagctcgaaacgacctggatgaccgcagtgggactgagcgaaatggcggcagaagccgcataccagaccggggctgatcaagcatcaatcacggcacgtaaccatattcaactggtcaaacttcaagtggaagaggtgcatcaactttcgcggaaggctgaaaccaagctggccgaagctcaaatcgaagagctccgccaaaagactcaggaagaaggggaagaaagagcagaatccgagcaagaagcgtacctgagagaggac

SEQ ID NO: 32632 - DNA, 717 bp, synthetic construct
  misc_feature 1..717: note = Description of Artificial Sequence: Synthetic coding sequence
  source 1..717: mol_type = other DNA
atggcagcacttaagtcttggctctccagaagtgttacaagtttcttccgctatcggcagtgtctttgcgtgcctgtggtggctaatttcaaaaaacggtgcttctctgaactgatccgaccatggcacaagacagtcacgattggcttcggcgtgacactgtgtgccgtgccgattgcccagaaaagtgagccacacagtctatcctcagaagccctgatgcgacgagccgtttcactcgtgacggattcgacgtcaaccttcctttcacagacaacctatgcactgattgaggcaattaccgaatacacaaaggctgtgtacactcttacctccctctatcggcaatacaccagtctgttgggcaaaatgaattcagaggaagaggacgaagtttggcaggtcatcattggcgctcgggcagaaatgacaagcaagcaccaggagtacctgaaactggaaaccacctggatgacggccgttggacttagtgaaatggccgctgaggctgcttaccagaccggcgccgaccaggcgagcatcaccgccagaaaccacattcagctggtgaaactccaggtggaggaggtccaccaactctccagaaaggcagaaaccaagcttgctgaggcccagatcgaagagctgagacagaagacgcaagaggaaggcgaagaacgggcagagtccgagcaggaggcttatctacgcgaagat

SEQ ID NO: 32633 - DNA, 717 bp, synthetic construct
  misc_feature 1..717: note = Description of Artificial Sequence: Synthetic coding sequence
  source 1..717: mol_type = other DNA
atggccgccctgaagagctggcttagcagaagtgtgacttctttcttcaggtaccgccagtgtctttgcgtccccgtggtcgccaactttaagaaaaggtgcttctccgaacttataagaccgtggcacaagacagttacaatcggttttggcgttaccctctgtgctgtccctatcgctcaaaaatccgaaccacacagcctcagctctgaggccttgatgagaagggctgtctctctagttactgatagcaccagcactttcctgtctcaaacaacctacgccctgatcgaagcaattaccgagtataccaaagcggtgtacacgctcaccagcctgtataggcaatacactagcctattgggcaagatgaattctgaggaagaagacgaggtgtggcaggtcattatcggcgcaagggccgagatgacgagtaagcaccaagaatacttgaagttggagaccacatggatgaccgcagtgggcctcagcgaaatggctgctgaggccgcataccaaaccggcgcagaccaagcctcgatcaccgctcggaaccatatacagttggtcaagctgcaggtcgaggaggtgcaccagctgtcaagaaaggccgaaaccaagctcgctgaagctcagattgaagagctgaggcagaagactcaagaagagggcgaagagagggctgaatccgagcaagaggcctatctgagagaggat

SEQ ID NO: 32634 - DNA, 717 bp, synthetic construct
  misc_feature 1..717: note = Description of Artificial Sequence: Synthetic coding sequence
  source 1..717: mol_type = other DNA
atggcagccctcaaaagctggctgtccagatcagtgacttcgttcttccgctaccgccagtgcctgtgcgtcccggtggtggcgaactttaagaagaggtgctttagcgagctgatcagaccgtggcacaagaccgtcacgatcggattcggagtgaccctgtgcgccgtgcccatcgcacagaaaagcgagccgcacagtctttcctccgaggcgctgatgcggagggctgtgagcttggtcacggactcaacctcgactttcttgtcacaaactacctacgcgctgatcgaggcaattaccgaatacactaaggctgtgtacaccctgactagcctgtacagacagtacacctccctcctggggaagatgaactccgaagaggaggacgaagtatggcaagtcatcatcggagctagagcagaaatgacttcaaaacatcaggagtacttgaaacttgagactacctggatgaccgcggtgggactgtcagaaatggctgccgaggcggcctatcagaccggcgccgaccaagcctcgattacggcacgcaaccatatccagctcgtcaagctccaggtggaagaggtgcaccagttgtcccgcaaggccgaaaccaagctggctgaagcccaaatcgaagaactgcggcaaaaaactcaggaggagggcgaagagcgggccgagtcagagcaggaagcctacctgcgggaagat

SEQ ID NO: 32635 - DNA, 717 bp, synthetic construct
  misc_feature 1..717: note = Description of Artificial Sequence: Synthetic coding sequence
  source 1..717: mol_type = other DNA
atggccgcactgaaatcctggcttagtcgatccgtgacgtccttctttagatatcgccaatgcctatgtgtgccagttgtggccaacttcaagaaaaggtgcttcagcgaactgatcagaccgtggcacaagacagtaaccattggattcggggtcaccctgtgtgcagtgccgatcgcgcagaaatcagagccacattcactgtcatcagaggcccttatgcgaagggccgtgtcgctggtgacagattccacgtctacatttttatcgcagactacctacgcccttatcgaagccatcactgaatacaccaaagctgtgtatactctcacctctctctaccggcagtatacctcacttctgggaaaaatgaattctgaggaggaggatgaggtatggcaagtgatcatcggcgcacgtgctgagatgactagcaaacatcaggagtacctcaaactggaaactacgtggatgaccgctgtcggtctgagcgagatggccgccgaagccgcttaccagaccggggctgaccaggcatcaattaccgcccgaaatcacatccagctggtcaagctgcaagttgaggaggtccaccagctctcacggaaggccgagacaaaactcgctgaggcacagatagaagaattaagacagaagacccaggaagagggcgaggaacgggctgagtctgagcaggaggcatacctcagggaggat

SEQ ID NO: 32636 - DNA, 717 bp, synthetic construct
  misc_feature 1..717: note = Description of Artificial Sequence: Synthetic coding sequence
  source 1..717: mol_type = other DNA
atggccgcattgaagtcctggttgtcccgctcggtgacttcgtttttccggtaccggcagtgtctctgcgtccccgtggtcgctaacttcaagaagaggtgcttttctgagctgatccggccgtggcacaagactgtcacgattggtttcggggtgactctgtgcgcggtgcctatcgcgcagaagtcggaaccgcacagcctgagctcagaagcccttatgaggagggctgtctcgctcgttactgacagcacctccacttttctctctcaaactacctacgcactgatcgaagctatcactgagtacactaaggcggtgtacaccctcacctccttgtacagacaatatacctccctgctgggaaagatgaattcggaagaagaggatgaagtgtggcaggtgatcattggagcccgggctgaaatgacgtcgaaacatcaggaatatctcaaactcgaaaccacctggatgaccgccgtcggactttccgagatggccgccgaagcagcgtaccagaccggagctgaccaggcgagcataaccgcgcgcaaccatattcagctggtgaagctgcaagtggaggaggtgcaccagctgtctcgtaaagcggaaactaagctggccgaagcacaaatcgaggagctgagacagaaaactcaagaagagggcgaggaacgcgccgaatcggaacaggaggcatatctgcgagaagat

SEQ ID NO: 32637 - DNA, 717 bp, synthetic construct
  misc_feature 1..717: note = Description of Artificial Sequence: Synthetic coding sequence
  source 1..717: mol_type = other DNA
atggccgctctcaagtcctggttgtcccgctccgtaacatcatttttccgatatcgtcagtgtctgtgtgttccggtggtcgccaattttaagaaacgttgtttcagcgaactcatccgaccgtggcacaaaacagtgacaattggcttcggggtcactctgtgtgcagtaccgatagcacagaagagcgagccacactctttatcctctgaggccctaatgcgtcgagctgtgagcctggtcaccgattctacttcgacattccttagtcaaaccacctatgctctcatagaggctatcaccgagtatactaaggcagtttacaccttaaccagtttgtatcgccagtacacttctctcctgggtaagatgaacagcgaggaagaggacgaggtttggcaggtgatcatcggagcgcgggcagaaatgacgtcgaaacatcaggagtacttaaaacttgagacgacctggatgactgcagtgggactttcggaaatggccgccgaggcagcgtatcaaaccggtgccgaccaagcaagtatcacagcgcggaaccatattcaacttgtcaaattacaagtagaagaagtacaccaattatcacgcaaggctgagactaagctcgccgaagcgcagatcgaggagttaagacagaagacccaggaagaaggcgaggagcgtgcggagtccgaacaagaggcgtacctgcgggaggac

SEQ ID NO: 32638 - DNA, 717 bp, synthetic construct
  misc_feature 1..717: note = Description of Artificial Sequence: Synthetic coding sequence
  source 1..717: mol_type = other DNA
atggcagcactcaaatcgtggctgtcgcgtagcgtcacttcgttctttagatacaggcagtgtctttgtgtgcccgtcgtcgcaaatttcaagaagagatgcttttcagagctcattcggccatggcataaaactgtcactatcggatttggcgtcaccctgtgcgccgtccctattgcacaaaagtcggagccacattcgttgtcatccgaagcactcatgagaagagcggtttccctggtgaccgactccaccagcacctttctgtctcagactacttacgctttgatcgaagcaattaccgaatacactaaggcagtgtacaccctcacttccctgtaccgtcaatacacgtcgctgctcggtaagatgaattcggaagaagaagatgaggtgtggcaggtgattatcggtgcccgcgcagaaatgacttcgaagcatcaagaataccttaagttggaaacgacttggatgaccgcagtgggcctttccgaaatggcagcagaagcagcataccaaaccggggccgatcaggcatcgatcactgcacggaaccacatacaactggtgaagctccaggtcgaggaggtgcaccaactctcgcggaaggctgagactaagctggcggaagcacagattgaagagcttagacaaaagacgcaagaagagggggaagaaagagcagagtcggaacaagaggcctacttgagagaagat

SEQ ID NO: 32639 - DNA, 717 bp, synthetic construct
  misc_feature 1..717: note = Description of Artificial Sequence: Synthetic coding sequence
  source 1..717: mol_type = other DNA
atggcggcccttaagtcttggctatcccggagcgtgaccagcttttttcgctatcggcagtgtttgtgtgttcctgtcgtggccaattttaagaagcggtgcttctcggagcttattagaccatggcacaaaacagtgaccattggctttggtgtgaccctgtgcgccgtcccaattgcgcagaagagcgaacctcattcactgagttccgaggccctcatgaggcgcgccgtcagccttgtgacggatagcacatcgactttcctgtcccagacaacatacgccctgatcgaagccatcaccgagtacactaaggcagtctacaccctgaccagtttgtatagacagtatacaagtctgctaggaaagatgaatagtgaagaagaagacgaagtgtggcaggtgatcattggtgccagagcagaaatgacatcgaagcatcaggagtacctgaagttggaaactacctggatgacagcggttggactgtccgagatggctgctgaggcggcttaccagacaggcgctgatcaggcctccatcaccgctcgtaatcatatacagctggtgaagttacaagtggaagaggttcaccagctgagcagaaaagctgagactaagcttgctgaagctcagatagaagagttgagacagaaaacccaggaagaaggtgaagaaagggcggaaagcgagcaggaagcttatctgcgggaggac

SEQ ID NO: 32640 - DNA, 717 bp, synthetic construct
  misc_feature 1..717: note = Description of Artificial Sequence: Synthetic coding sequence
  source 1..717: mol_type = other DNA
atggccgccctgaaatcctggctgagccgctctgtgacatcttttttccggtataggcagtgcctgtgcgtgccggtcgtggccaattttaagaaacgctgcttcagcgagctgattagaccctggcacaagaccgtcacaatagggttcggtgtaaccctgtgcgctgtccctattgcacaaaagagcgagccccatagcctgagctccgaggcgttaatgaggcgggccgtgtcattggtgacggactccacctccacatttctgtcacagacaacttatgcattgattgaggctatcacagagtatacaaaggcagtctatacactgacctccctctatagacagtacacctccctgctcggcaagatgaattccgaggaagaagatgaggtgtggcaagtgatcataggagccagagcagagatgacgtcgaagcaccaggaatacctgaaactggagaccacttggatgacagccgtcggactcagcgagatggcagccgaagcagcgtatcaaaccggcgccgatcaggcaagtataacagcaagaaatcatatccagctggtgaagctgcaagtagaggaagtccaccagctgagccgcaaggccgagaccaagctcgccgaagcccaaatcgaggagcttcgacagaagactcaggaagaaggggaggaaagggcagagagtgagcaagaggcctatctgcgtgaggac

SEQ ID NO: 32641 - DNA, 717 bp, synthetic construct
  misc_feature 1..717: note = Description of Artificial Sequence: Synthetic coding sequence
  source 1..717: mol_type = other DNA
atggccgccctgaagtcctggctgtcgcggtcagttacgtcgttttttcgctaccgtcagtgcctctgcgtccctgtggtggccaatttcaaaaaacgatgcttctcagaactgatcaggccgtggcataagactgttacgatcggatttggagtgacgctgtgcgccgtcccaatcgcgcagaaaagcgaaccacactctctcagcagtgaagcgctgatgcggcgggcagttagcctggtgactgattcgacttcgaccttcttgagccagactacttacgcgttgatcgaggcaatcactgagtataccaaggccgtgtacactctgacctccctgtacaggcagtacaccagcctcctcggaaagatgaactccgaagaagaagatgaggtgtggcaggtcatcattggagcccgcgcagaaatgacttccaagcatcaagaatacctcaagctggaaaccacctggatgactgcggtgggcctctcggagatggcagcagaagccgcctaccagactggagcagaccaagcatccatcactgccagaaaccatatccagcttgtgaagttgcaggtcgaggaagtgcaccagctcagccggaaggcggagacgaagctggccgaggcccaaatcgaagagcttcgacagaaaacccaagaagaaggcgaagagagggccgagtctgagcaggaggcctacctgcgcgaggac

SEQ ID NO: 32642 - DNA, 717 bp, synthetic construct
  misc_feature 1..717: note = Description of Artificial Sequence: Synthetic coding sequence
  source 1..717: mol_type = other DNA
atggctgcattgaagtcatggttatctcgaagtgtgactagttttttcagatatagacaatgtctttgtgttccagttgttgctaattttaaaaaaagatgtttttcagaacttattagaccatggcataaaacggtaacgattggatttggagttacattatgtgctgttccaattgctcaaaagtctgaacctcactctttatcctcagaagctcttatgaggagagcagtatcgttggttacagattcaacatcaacgtttttgtcacaaaccacttatgcattaattgaagcaattacagagtatactaaagctgtttatactttaacatcattatatagacaatatacctctttattaggaaaaatgaatagtgaagaagaagatgaagtatggcaagttattattggtgcaagagctgaaatgacttcaaaacatcaagaataccttaaactagaaacaacttggatgacagctgtcggacttagtgagatggcagcagaagcagcatatcaaacaggagctgatcaagcatcaatcactgctagaaatcacattcaattggtcaaattacaagtagaagaggtacatcaattgtctagaaaggcagaaacaaaactcgctgaagcacaaattgaagaattgagacaaaagacacaagaagagggtgaagaaagagcagaatctgaacaagaagcttatttaagagaagat

SEQ ID NO: 32643 - DNA, 717 bp, synthetic construct
  misc_feature 1..717: note = Description of Artificial Sequence: Synthetic coding sequence
  source 1..717: mol_type = other DNA
atggcggccctgaaaagctggctcagcagaagcgtgacaagcttctttaggtatcgtcagtgcctctgtgtcccggtcgtggcaaatttcaagaagcgatgtttctcagagctcattagaccctggcataaaaccgtaaccatcggcttcggggtgaccctctgtgctgtccctatcgcccaaaaatccgaaccacattcgttgtcatccgaggccctcatgcgccgcgccgtttccctggtgactgattccacttcgacctttctctctcagacaacatatgcactgatcgaagctatcaccgaatacaccaaggctgtctatacgctgacatccctgtaccgccaatatactagcctattgggtaaaatgaatagcgaagaggaggatgaagtgtggcaggtgatcatcggagccagagcagagatgacatctaagcaccaggaatatcttaaactcgaaactacatggatgactgccgtaggactgtccgaaatggcggccgaggccgcctatcaaacaggtgcggaccaggctagcattaccgcgcggaatcacatccagttagttaagcttcaagtggaggaggtacatcagctgtccagaaaggcggagacaaagctcgcagaggcgcagatagaagagttacggcaaaagacgcaggaagaaggcgaggaaagggctgagtctgagcaagaagcctacctccgagaagac

SEQ ID NO: 32644 - DNA, 717 bp, synthetic construct
  misc_feature 1..717: note = Description of Artificial Sequence: Synthetic coding sequence
  source 1..717: mol_type = other DNA
atggccgccctgaagtcatggttgtctcggagcgtcacttcattcttccggtacagacagtgcctctgcgtgcccgtcgtggcgaacttcaaaaagagatgcttctcagaactgatccggccttggcataaaaccgtgacgatcgggttcggcgtcactttgtgcgcagtgccaatcgcgcagaagtcagaaccacactccctgtcgagcgaagcgctcatgcggagggcagtgagcctggtgactgacagcacttcgacgtttctgagccagactacttacgccctgatcgaagcgataactgagtacacgaaagccgtgtatactctcacttcgctgtacaggcaatacacctccctgttgggtaagatgaattcggaggaggaagatgaagtctggcaggttatcattggcgccagagcggaaatgacctctaagcaccaagagtacctcaaactggaaaccacctggatgaccgccgtggggctgtcagaaatggcagcagaagcagcctaccaaactggagcagaccaagcgtcaatcaccgcccgcaaccatatccaacttgttaagctgcaggtggaggaagtgcaccaactgtcacgcaaggcggagactaagctcgcggaagcccagattgaagaactccgccagaaaacgcaagaggagggcgaggagagggcagagtcagaacaggaggcgtacctccgcgaagat

SEQ ID NO: 32645 - DNA, 717 bp, synthetic construct
  misc_feature 1..717: note = Description of Artificial Sequence: Synthetic coding sequence
  source 1..717: mol_type = other DNA
atggccgcactcaagagctggctgtctcggagtgttacctcttttttcaggtatcgacagtgtttatgcgtccccgtggtggccaacttcaagaagagatgtttttcagagctgattcgaccctggcataagacagtcacaataggctttggcgtgaccctctgtgccgttcctatcgcacaaaaatcagagccccatagccttagttcagaagcgctgatgaggcgcgcggtttccctggtgacagactcgacatccacgttcctgtcccagaccacgtacgcactgatagaggcaatcactgagtacacaaaggccgtatacacactgacgagcctctatcggcagtatacaagcttgctggggaagatgaacagcgaggaagaggacgaagtgtggcaggtgatcatcggggcccgggcggaaatgacaagcaagcaccaggaatacctgaagctggagactacgtggatgactgctgtcggactgagcgaaatggcagcagaggccgcttaccagactggcgccgaccaggcatctataacagcgagaaaccatattcagctggtgaaactacaggtggaggaggtgcaccagctgtctcggaaggccgaaactaaactggccgaggcccagatcgaagaacttagacagaagactcaggaggagggagaggagcgtgcagagtccgaacaagaagcttatctgcgggaggac

SEQ ID NO: 32646 - DNA, 717 bp, synthetic construct
  misc_feature 1..717: note = Description of Artificial Sequence: Synthetic coding sequence
  source 1..717: mol_type = other DNA
atggctgctctcaagtcgtggctttcccgcagcgtgacctcattctttcggtacagacagtgcctgtgcgtccctgtcgtcgcaaatttcaagaaacgctgcttctcggaactgattagaccgtggcacaagaccgtgaccatcggatttggtgtcactctgtgtgccgtgccgatcgcccaaaagagcgaaccacactccctcagctcggaagctctgatgcgccgcgctgtgtcgttggtcactgactccacttcaacgttccttagccaaactacctacgcgctgatcgaggcaattactgagtataccaaggccgtgtacaccctcacttcactgtaccgacaatacacttcgttgctcgggaagatgaactccgaagaggaggatgaggtgtggcaggtgatcatcggagcccgtgcggagatgacctctaaacatcaggaatacctgaagctggagacgacttggatgacggccgtgggcttgtcagaaatggccgccgaggccgcgtaccaaaccggcgcagatcaggcgtcgatcaccgcacggaaccatatccagctcgtgaaactgcaggtggaggaagttcaccaactcagccggaaggcggaaaccaagctggcagaagcgcagatcgaggaactgcggcaaaaaactcaggaagaaggagaagagagagccgaatccgaacaggaggcctacctgagggaggac

SEQ ID NO: 32647 - DNA, 717 bp, synthetic construct
  misc_feature 1..717: note = Description of Artificial Sequence: Synthetic coding sequence
  source 1..717: mol_type = other DNA
atggctgctttgaaatcttggctatccaggtctgtaacttcattcttcaggtatcgacagtgtttgtgtgtgcctgtcgtcgctaattttaagaaaagatgcttttcagagctcatccgaccctggcataaaacagttacaatagggttcggggttacactttgcgcagtgcctatcgcccagaagagtgagccacactcactctcgagtgaagcgttgatgaggagggccgtctctttggtaactgactccacatccacatttctgtcacagactacttatgccttaatcgaagccattactgaatatactaaagcagtttatacacttacatccctatatcggcagtacacttctctactcgggaaaatgaactcagaggaagaagatgaagtgtggcaggtcataatcggggcccgggccgaaatgacttccaaacatcaggaatacttgaaactagaaactacttggatgacagccgttgggttatcagaaatggccgcagaagccgcctatcagacaggagccgatcaggctagtatcactgcccgaaatcacatacagctcgtaaaactccaagtggaagaagtccaccaattgtcaaggaaagcggaaactaaattagccgaagctcagatagaagagctgcggcagaaaacacaggaagaaggagaagaacgcgctgaaagtgagcaggaggcctacttaagagaagat

SEQ ID NO: 32648 - DNA, 717 bp, synthetic construct
  misc_feature 1..717: note = Description of Artificial Sequence: Synthetic coding sequence
  source 1..717: mol_type = other DNA
atggcggccctgaaaagctggctgtcccgttccgtgacgtcgttttttcgataccggcaatgcttgtgtgtgcctgttgtggcaaacttcaaaaagagatgtttttcagagcttattagaccctggcataagactgtgaccattggcttcggagtgactttgtgtgccgtgccgatcgcacagaagtccgaaccgcactcgctttcgagcgaagcacttatgagacgcgccgtctccctcgtgactgattctacctcaacgttcctttcgcaaaccacttacgcacttatcgaagctatcactgaatacaccaaggccgtgtacactctcacttcgctctacaggcaatacacctccttgcttgggaagatgaactcagaggaggaggatgaggtgtggcaagtgataattggagctcgcgcagagatgacttcaaaacaccaagaatacctgaaactggaaaccacgtggatgactgcagtgggtctgtccgaaatggcagcagaagcagcgtaccagaccggcgcagaccaagcgtcgattactgcccggaatcacattcagcttgtgaagttgcaagtcgaggaggttcatcaactctcaagaaaagcagaaactaagctggcagaagcacaaattgaagagttgagacaaaagactcaagaggaaggagaagaaagagcagagagcgagcaagaagcatacctccgtgaggat

SEQ ID NO: 32649 - DNA, 717 bp, synthetic construct
  misc_feature 1..717: note = Description of Artificial Sequence: Synthetic coding sequence
  source 1..717: mol_type = other DNA
atggccgcactcaagagctggctgtcccgaagcgttacctccttctttcgctacaggcagtgcctgtgcgtcccagtggtggctaacttcaaaaaacggtgcttctccgaactgattagaccctggcataagaccgtcaccatcggctttggagtgaccttgtgtgcagtcccaatagcccaaaagtcggagccgcactcactttcgagtgaagctctcatgcgccgcgccgtgtccctcgttactgactcgacttctaccttcctcagccaaactacttatgccctgattgaagccatcactgagtacaccaaggccgtctacactctgacttcgctgtacagacagtacacttcactgctcggcaagatgaattccgaagaagaagatgaagtgtggcaggtgatcatcggtgcccgcgcagaaatgacctcgaagcaccaagaatacctgaagctggaaaccacctggatgacggcggtgggactcagcgaaatggcggccgaagcggcgtaccagacgggagccgatcaggccagcatcaccgcccggaaccacatccaactggtgaaattgcaggtggaggaggtgcatcagcttagccggaaggctgagacgaagttggcggaagcccagatcgaagaactgcggcagaaaacccaagaagaaggagaggaacgggctgagtcggagcaggaggcctacctgagagaagat

SEQ ID NO: 32650 - DNA, 717 bp, synthetic construct
  misc_feature 1..717: note = Description of Artificial Sequence: Synthetic coding sequence
  source 1..717: mol_type = other DNA
atggcagccttgaaaagctggctttccagatcagtgaccagcttttttcgctacaggcagtgtctttgcgtccccgtggtggccaatttcaagaagcgctgtttctcagagttgattagaccgtggcataaaactgtgaccataggatttggggtgactctttgtgcagtgccaattgcccaaaagtcggaaccccatagtctgtcctcggaggctttgatgaggagagcagtctctcttgtgaccgatagcacttccacctttctttcccagaccacgtatgccctgattgaagcgataactgaatacactaaggccgtctacacccttacttcattgtacagacagtacacctcacttctcgggaagatgaactccgaggaggaagatgaagtgtggcaagtgatcattggagcacgcgcggagatgacttcaaagcatcaagagtacctcaaactggagactacctggatgaccgcggtgggattgtccgaaatggctgcagaggcagcataccagaccggtgcagaccaggcatcgatcacggctcgaaaccatatccaacttgtgaagctccaagtggaagaggtgcatcaactctcgcggaaggccgaaaccaagctggcagaagcacaaatcgaagaactgagacaaaaaacccaagaagaaggtgaggaacgtgcggagtccgagcaagaggcgtacttgagagaagat

SEQ ID NO: 32651 - DNA, 717 bp, synthetic construct
  misc_feature 1..717: note = Description of Artificial Sequence: Synthetic coding sequence
  source 1..717: mol_type = other DNA
atggccgccctgaagtcctggctttctcgctctgtcacaagttttttcagataccgccagtgtctgtgtgtgccagtcgtggcgaacttcaagaagcggtgcttctccgagctgattagaccgtggcataagacggtgacgatcggctttggtgtgactctgtgcgctgtgcccatcgctcagaagtccgagccccacagcttgagctctgaggccctcatgcgtagagccgtgtccctcgtgacagactccacctcaaccttcctgtcccagactacttacgcgctaatcgaagccattacggaatacactaaagccgtttatacgctgactagtctgtacagacagtatacctcattgctcggaaagatgaacagtgaggaggaagatgaagtgtggcaggtcatcattggcgctagagccgaaatgaccagcaagcaccaggagtacttgaagctagagaccacctggatgacggcagtcggcctgtcagagatggctgcggaggccgcctatcagaccggcgctgaccaggcttcaatcaccgctcgcaaccacatccagctggtgaagctccaggtcgaagaagttcaccagcttagtcgtaaggccgagaccaagctggccgaagcgcagatcgaggaactccgccagaaaacccaggaagagggggaggaacgagctgaatctgagcaggaggcatatttgagggaggac

SEQ ID NO: 32652 - DNA, 717 bp, synthetic construct
  misc_feature 1..717: note = Description of Artificial Sequence: Synthetic coding sequence
  source 1..717: mol_type = other DNA
atggccgcactcaagagctggttgagccgctcagtgacctccttctttagatacagacaatgcctctgtgtcccagtggttgccaactttaagaagaggtgtttcagcgagcttattcgtccttggcataagactgtgaccattggatttggagtcactctgtgtgccgtgcccatcgcgcagaagtctgaacctcattcgctgtcgtccgaagcattgatgcggcgggccgtctcccttgtgaccgacagcacctctacgtttctgtcgcagactacttatgcacttatcgaggcaataacggaatacactaaggcggtttacacgcttacgtccctttaccgccagtacacctcactgctggggaagatgaactctgaagaagaagatgaagtctggcaggtgattatcggagcgcgagctgagatgactagcaagcaccaagagtacttgaaacttgaaaccacctggatgactgcggtgggcctgtcggaaatggcagcagaagcagcctaccagaccggcgctgaccaagcatcgatcacggctagaaatcacattcagctggtcaaactccaggtcgaggaggtgcatcaactgagccgcaaagctgaaacgaagctcgcagaagcacaaattgaggaactccgacaaaaaactcaagaggagggtgaagagagagccgaatccgaacaggaggcatacctccgggaagat

SEQ ID NO: 32653 - DNA, 717 bp, synthetic construct
  misc_feature 1..717: note = Description of Artificial Sequence: Synthetic coding sequence
  source 1..717: mol_type = other DNA
atggccgcattgaagtcgtggctttccaggtcagtgacctccttctttcgttacagacagtgtctgtgcgtgccagtggtcgctaatttcaagaagcggtgtttctccgagctcatcaggccctggcataagaccgtgacgataggatttggtgtgactctgtgtgccgttccgatcgcacaaaagtcggagcctcactcgctttcatctgaagcattgatgcggcgggcagtcagcctcgtgactgactccacttcgacctttctgtcccaaaccacgtatgccctgattgaggccattactgagtacaccaaggcagtgtacacgcttacctccctgtaccgtcaatacacctcgctccttggaaaaatgaactcggaagaagaagatgaagtgtggcaagtgatcatcggagcacgagctgaaatgacctcgaagcaccaggaatatctgaaattggaaacgacgtggatgactgcagtgggcctgagcgagatggctgcagaagccgcttaccagaccggggccgatcaggcatcgattaccgccagaaaccatatacaactggtgaagctccaggtggaagaagtccaccagctgtccagaaaagctgaaacgaagctggccgaggcccagatcgaggagctgcgtcagaaaacccaagaagaaggagaagaacgggccgagtcagaacaggaagcgtaccttagagaggat

SEQ ID NO: 32654 - DNA, 717 bp, synthetic construct
  misc_feature 1..717: note = Description of Artificial Sequence: Synthetic coding sequence
  source 1..717: mol_type = other DNA
atggcagcgctgaaaagttggctgagccgctcagtcacttcctttttccggtatcgccaatgcttatgtgtacccgtcgttgccaatttcaagaagcgctgtttttccgaactgatccgcccgtggcacaaaaccgtgactattggtttcggcgttaccttgtgtgcagtcccaattgcccagaagagtgagcctcacagcctgtcgtctgaggccctcatgcgacgggcggtgtctttggtcaccgactctacgtccacatttctgagccaaactacgtatgccctgatagaggccatcactgagtacacaaaggccgtgtatactcttacttctctgtacagacagtacacatctctgcttggcaagatgaacagcgaggaggaagacgaggtgtggcaagtgattattggggcgcgggcagagatgacttccaagcatcaggagtatctgaagctggaaactacatggatgaccgccgtggggctgagtgaaatggcagctgaagccgcataccagactggcgccgatcaggccagcataacggctaggaaccacattcagttggtgaagctccaagtggaggaagtccaccaactctcccgaaaggcagagacaaaactggccgaagcccaaatagaggaactgcgacagaaaacacaagaggaaggtgaggagcgcgcagagtccgagcaggaggcgtacctgagagaggat

SEQ ID NO: 32655 - DNA, 717 bp, synthetic construct
  misc_feature 1..717: note = Description of Artificial Sequence: Synthetic coding sequence
  source 1..717: mol_type = other DNA
atggccgccctgaaaagctggctttcacgttcggtcacttccttttttcggtaccggcagtgcctctgtgtgccggtcgtggcaaactttaagaaacggtgcttttcggaactcatcagaccttggcacaaaacggtgaccattggatttggagtcaccctttgtgcggtgcctattgcacagaagtctgaacctcactccctttcgtcggaagcacttatgagaagagcagtgagcctggtgactgattcgacctccacgttcctgtcacaaactacctacgcgctgatcgaggcaattactgagtacacgaaggcggtctacactctgaccagcctttatcgacagtacacctccctccttgggaaaatgaactccgaagaggaagatgaggtctggcaggtcattataggtgcacgcgcggagatgacgtctaagcatcaggagtacctcaagttggaaaccacctggatgactgccgtgggcctttcggaaatggcagcagaggcggcgtaccaaactggtgcagatcaagcatcgatcaccgcgagaaatcacattcagctggtgaagctgcaggtggaagaggtccatcagctgtcaaggaaggcagaaaccaagctcgccgaggcacagattgaagagcttcggcaaaagactcaagaagaaggcgaagagcgcgctgaaagcgagcaggaagcatacctccgcgaagat

SEQ ID NO: 32656 - DNA, 717 bp, synthetic construct
  misc_feature 1..717: note = Description of Artificial Sequence: Synthetic coding sequence
  source 1..717: mol_type = other DNA
atggccgccctgaagtcttggctgtcaaggagtgttacttccttcttccgctatcggcagtgcctgtgtgtccctgtggtggccaatttcaaaaagcggtgtttcagcgagctgatccgcccctggcataagactgtgacaatcggctttggcgtgacactgtgtgctgttccaatcgcgcagaagagcgaaccccatagcctctcaagcgaggccctaatgcgaagggccgtatccttggtcaccgactctacaagcactttcttgagccagacaacatacgctctgatcgaggcgattactgagtacacaaaggccgtttataccctgacgagtctctatcgacaatacacatctctgctcggcaagatgaacagcgaggaagaagatgaggtatggcaggtgattattggggctcgagcggagatgacatccaagcaccaggagtaccttaaacttgagacaacatggatgaccgctgttggcctgagcgagatggccgcggaagcggcttatcagaccggggccgaccaggcgtctatcacggcccgcaaccacatccagctcgtgaaactccaggtggaggaggttcaccaactgagcagaaaagcggaaacaaagctcgcagaggcccagatcgaagagctgagacaaaagacccaagaggagggtgaagaaagagctgagtctgagcaggaagcctacctgcgggaggat

SEQ ID NO: 32657 - DNA, 717 bp, synthetic construct
  misc_feature 1..717: note = Description of Artificial Sequence: Synthetic coding sequence
  source 1..717: mol_type = other DNA
atggcggctctgaagtcctggctgtcccggtctgtgacttctttttttagatataggcagtgcttgtgcgtgccggtggtggcaaacttcaaaaagcgctgtttttctgagttgatcagaccctggcacaaaacagtgacaatcggattcggagtcacactttgcgccgtccccattgctcagaaatctgaacctcacagtctgagttcggaggcccttatgcgaagagccgtttccctggtgactgattctacttccacctttttgtctcagacgacatatgcccttatcgaggcgataacagagtatacaaaagccgtctatacgctcacatcgctgtaccgtcagtatacttctctattgggtaaaatgaattctgaagaggaggacgaagtgtggcaggtgatcatcggagcaagggcggagatgacatcaaagcaccaggagtatctgaaactggaaacgacttggatgaccgccgtcggcctgtctgagatggccgcggaagccgcctaccaaacaggagctgatcaggcatcgataacggcccgtaaccatattcagctggtcaaactgcaggtagaggaggtgcaccagttgtcaaggaaggccgaaaccaagctggctgaggctcagatcgaggaactcagacagaaaacccaggaggagggtgaggaacgcgccgaatcagaacaagaggcgtacctgcgagaggac

SEQ ID NO: 32658 - DNA, 717 bp, synthetic construct
  misc_feature 1..717: note = Description of Artificial Sequence: Synthetic coding sequence
  source 1..717: mol_type = other DNA
atggcggcactgaagtcgtggctgtcacggtccgtgacctcgtttttccgctatcgccagtgcctgtgtgtgcctgtcgtcgcgaacttcaagaaaaggtgctttagcgagttaatccgtccctggcacaagacagtgacaataggcttcggcgtaaccctctgcgcggtgccgatcgctcaaaagtcggaaccccactctctgagctccgaagctctgatgaggcgcgcggtcagtctcgttaccgactcgacatccactttcctgtcgcaaacgacctacgccctaatcgaggctatcaccgagtacactaaggccgtatatactctaacaagcctgtatcgacaatacaccagccttttgggtaagatgaactcagaagaagaagatgaagtctggcaggtgatcattggagcgagagccgagatgacgtcgaagcaccaagagtatcttaagctggagaccacctggatgactgcggtgggcctgtcggagatggctgccgaagctgcctatcagacaggagcagatcaggcgtctatcacagcccgtaaccacatccaactggtgaaacttcaggttgaggaggtgcatcagctgtctcgtaaggccgagacaaaattagccgaagcccaaatcgaagagctgcgccaaaagacgcaggaggagggtgaggagcgcgccgagagtgagcaggaggcgtatctaagagaagat

SEQ ID NO: 32659 - DNA, 717 bp, synthetic construct
  misc_feature 1..717: note = Description of Artificial Sequence: Synthetic coding sequence
  source 1..717: mol_type = other DNA
atggctgcgcttaaaagttggttaagtcggagtgtgacctcttttttcagataccggcaatgtctgtgtgtcccagtggttgccaatttcaaaaagcggtgcttcagcgagcttatcaggccgtggcataagactgtgacgattggatttggggtgacactatgcgcagtccccatcgcacagaaaagcgaacctcacagcctgtcctccgaggcacttatgcgtagggccgtgagcttggtaaccgattcgactagcacatttttgagccagaccacctatgcgctaattgaagcaataacagaatacacaaaggctgtatatacactgactagcctttacaggcagtatacctccctcctgggcaaaatgaacagtgaggaggaggacgaagtctggcaggtcattatcggagctagggctgaaatgacaagcaaacatcaggaataccttaagctggagactacttggatgactgcagtcggcctttcagagatggcggctgaagctgcatatcaaacgggcgctgatcaggcgagtataaccgccaggaaccacattcagcttgtgaaactgcaggtggaggaggtacaccaattgtccagaaaagccgagacaaagctcgcggaagcgcagatcgaggaacttagacagaaaacgcaggaggaaggtgaggaacgcgccgagtcagagcaggaggcctatcttcgtgaggac

SEQ ID NO: 32660 - DNA, 717 bp, synthetic construct
  misc_feature 1..717: note = Description of Artificial Sequence: Synthetic coding sequence
  source 1..717: mol_type = other DNA
atggctgctctgaaaagctggttgtcaagatctgtgacgtccttctttagataccggcagtgtctctgtgttccagttgtcgccaacttcaaaaagcgatgtttttcagagctaatcaggccgtggcataagactgttactatcggattcggagttaccctctgcgctgtgcctatcgcacagaaatccgagccgcattccctctcgagtgaagccctgatgaggcgcgcagttagtcttgttaccgactctacctccacattcctctctcagaccacctacgctcttatcgaggcaatcaccgagtacacaaaagccgtttacaccttgaccagtctgtatagacagtatacatctcttttgggaaaaatgaacagtgaggaggaggatgaagtgtggcaggtgatcatcggagctagggccgaaatgactagcaagcatcaagagtacctaaagctggaaaccacttggatgaccgctgtgggactctcagagatggctgcagaggcagcatatcagacaggcgcagatcaggcatctatcactgctagaaatcatatccaactagtaaagctgcaggtggaagaagttcatcaactttcccgtaaggccgaaactaagctcgccgaagctcagatcgaggaacttcgtcaaaaaactcaggaggagggagaagaaagggcagagagcgagcaggaagcttatctgcgtgaagac

SEQ ID NO: 32661 - DNA, 717 bp, synthetic construct
  misc_feature 1..717: note = Description of Artificial Sequence: Synthetic coding sequence
  source 1..717: mol_type = other DNA
atggcggctctcaagagttggctgagccggagcgtgacatcatttttccgctatcgccagtgcttatgtgttcctgtggtggctaattttaaaaagcgatgcttcagtgaactgatcagaccctggcacaagacggttaccataggttttggggttaccctctgtgctgtgcccattgcccagaagagtgaaccccatagcttatcttccgaagccctgatgcgtagggcggtctctctggtgaccgattccacaagcacttttctgagccagaccacttacgccctcatcgaggcaataaccgaatatacgaaggctgtttatactttaacctccctttatcgacaatatacaagcctgctagggaagatgaattctgaagaagaagacgaagtgtggcaggtgatcattggggcaagagcagaaatgacttccaaacaccaagaatatctgaagctggagaccacttggatgacagcagtcggactttcagagatggcggcagaagctgcgtaccagacgggagctgaccaggctagcatcaccgctaggaaccacatccagctggtgaagctccaggtggaagaggtgcaccagctgtctcgcaaggctgagaccaagctcgctgaagctcagatagaagagctgagacaaaagacccaggaagagggagaggaaagggccgagtccgaacaagaagcttaccttagagaagac

SEQ ID NO: 32662 - DNA, 717 bp, synthetic construct
  misc_feature 1..717: note = Description of Artificial Sequence: Synthetic coding sequence
  source 1..717: mol_type = other DNA
atggctgccctcaaatcatggctgtcccggagcgtcacctctttctttcggtaccgccagtgcctgtgcgtgccggtggtcgcgaacttcaagaagcgctgtttcagcgaactcatccggccgtggcacaaaactgtgacgatcggattcggagttacgttgtgcgccgtcccaattgcacaaaaatcagaaccgcattcattgtcatccgaagcgctgatgagacgcgcggtgtcgcttgttacggattccacttccacttttctgagccaaactacttacgcccttatcgaagccatcactgaatacactaaggccgtgtacacgctgacctccctctaccggcagtacacttcgctcctcggtaagatgaactcagaggaagaggacgaggtctggcaggtgatcatcggagcccgcgcagaaatgaccagcaagcaccaggaatatctgaaattggaaactacctggatgaccgccgtgggcctgagcgagatggccgcagaggcagcgtaccagactggcgccgatcaggcgagcatcaccgcgcggaaccatatccagctcgttaagctgcaggtggaggaggtccatcagctctcgaggaaagcagagactaagctggcagaggcacaaatcgaggaactgcgccagaaaactcaggaagagggagaggaacgagcagaatcagaacaagaagcctacctccgcgaggac

SEQ ID NO: 32663 - DNA, 717 bp, synthetic construct
  misc_feature 1..717: note = Description of Artificial Sequence: Synthetic coding sequence
  source 1..717: mol_type = other DNA
atggccgctctcaaaagttggctgtcccggtccgtaacgtctttcttcagatatcgacaatgcttatgtgtgcccgtcgtggccaatttcaagaagcgatgtttttctgagttaattcgcccgtggcacaagacagtcaccataggcttcggagttacactgtgcgccgtacccatcgcgcagaaatcagaaccccattccctgagtagtgaggccctcatgagaagagccgtctccctcgtgactgactcaacctcaaccttcctgtctcagaccacctacgcactgatagaagccatcacagaatacaccaaagccgtttacaccctgacctccctgtaccggcagtacacaagtttgcttggcaagatgaattcagaagaagaggatgaggtgtggcaggttattatcggggctcgcgccgaaatgaccagcaaacatcaggagtatttgaaattggaaaccacatggatgactgcggttggactgtcagagatggctgcggaggctgcataccagacgggtgcggatcaggcctctatcactgcacgcaaccatattcagttagtgaaactgcaggtcgaagaagtgcatcagctgtcacggaaggccgagactaagctggccgaagcgcagattgaggagttgaggcagaagacgcaggaggaaggagaggagagagccgaaagtgaacaagaggcgtacctgcgtgaggac

SEQ ID NO: 32664 - DNA, 717 bp, synthetic construct
  misc_feature 1..717: note = Description of Artificial Sequence: Synthetic coding sequence
  source 1..717: mol_type = other DNA
atggcggctctgaagtcatggttgtctcgcagcgtgacctcattcttccgatacaggcagtgtttgtgcgtacctgtggtggccaacttcaaaaaacgatgcttttccgagctgatcaggccctggcacaaaacagtgaccataggattcggagtgaccctttgcgctgtgcccattgcccagaaatccgagccacactcactgtcgtccgaggccttgatgcgcagagctgtgagtctcgttacggatagtaccagtacatttttgagccagactacatacgctctaattgaggctatcacagaatacactaaggcagtatatactctgactagcttatacagacagtatacatctctgctagggaaaatgaattcagaagaggaagacgaggtatggcaggtcattatcggagccagggccgaaatgacctcaaaacatcaggagtatctgaagctggaaaccacctggatgacggccgtgggactcagtgagatggccgcagaggccgcctatcagacaggggccgaccaggcaagtatcacagcccggaaccatatccagcttgtaaaactacaggtggaagaagttcaccagttatctaggaaggctgagacaaagttggctgaggcgcagatcgaggagctgagacaaaagacacaggaagagggcgaagaacgagcagagagcgagcaagaagcctatctccgggaggac

SEQ ID NO: 32665 - DNA, 717 bp, synthetic construct
  misc_feature 1..717: note = Description of Artificial Sequence: Synthetic coding sequence
  source 1..717: mol_type = other DNA
atggccgccctcaagagctggttgtcgcgttctgtgactagcttctttcggtaccggcaatgcctgtgcgttcctgtcgtggcgaatttcaagaagcggtgtttcagcgaactgatccgcccgtggcataagaccgtgactattggctttggagtgaccctgtgcgcagtgccaatagcgcagaagtcagagccgcactcactgagctcggaggcactcatgcgcagagccgtctccctggttaccgactccacgtccaccttcctctcacagactacgtacgccctgatcgaagcaatcactgaatacaccaaagcggtctacacgttgacctccctctatcggcaatacacttcgctcctggggaagatgaacagtgaggaagaagatgaagtctggcaggtgatcatcggtgcgcgcgctgaaatgaccagcaaacaccaggagtacctgaagctggaaaccacctggatgaccgcggtcggcctgagcgaaatggcagctgaagcggcctatcagactggagccgatcaggcgagtatcaccgcccggaaccacattcaactggtgaagctgcaggtggaagaggtccatcagttgtccaggaaagccgaaactaaacttgccgaggcccaaatcgaggaactccggcaaaagactcaggaggagggagaggagcgcgcagagtccgaacaagaagcatacctcagagaggat

SEQ ID NO: 32666 - DNA, 717 bp, synthetic construct
  misc_feature 1..717: note = Description of Artificial Sequence: Synthetic coding sequence
  source 1..717: mol_type = other DNA
atggctgctttgaaatcttggctttccagatcggtcacgtcattctttcggtaccgacaatgcctgtgcgtacccgtggtggcaaatttcaagaaaagatgttttagcgagcttattcgaccttggcataagactgtcacgattgggttcggtgtcaccttgtgcgccgtccccattgcgcaaaagagcgagccacattctctgtcctctgaagcactgatgcgccgtgcagtgtcactagtgactgactccacttccaccttcttaagccaaactacatatgccctgattgaggcaatcacagagtacacgaaagctgtctacaccttgactagtctctaccggcagtatacttccttgctgggcaagatgaattcagaggaggaggatgaagtgtggcaggttatcattggggcacgcgctgagatgacctccaaacatcaggagtacctgaagctggagaccacatggatgactgccgtcggtctgagtgagatggctgctgaagctgcataccagacaggtgccgaccaggcttcgatcactgcccgcaatcatatccaacttgtcaagttacaggtcgaagaggtccaccagctatcaagaaaagctgagactaagctggctgaggcccagatagaggaactgcgccagaagacacaggaagagggcgaagaacgggccgagtccgagcaggaggcctatctgcgagaggat

SEQ ID NO: 32667 - DNA, 717 bp, synthetic construct
  misc_feature 1..717: note = Description of Artificial Sequence: Synthetic coding sequence
  source 1..717: mol_type = other DNA
atggccgcacttaagagttggctgagccggagcgttacctcttttttccgctatcgacagtgcttgtgcgtcccagtcgtcgcgaatttcaagaagcggtgttttagtgagctgatacggccctggcataaaacagtgactatcggtttcggcgtcacgttatgtgcggtccctattgcgcagaaaagcgaaccccatagtctgtcaagcgaggcactgatgcgacgggccgtttcacttgtgaccgatagcacgtcaacctttctgtcacagacgacctatgcactgatagaagctatcaccgagtatacgaaggccgtgtatacccttacctcactgtacagacagtatacgtctctgctgggaaagatgaacagtgaggaagaagacgaggtgtggcaggttatcatcggggcccgagctgaaatgaccagtaaacaccaggaataccttaagttggaaaccacttggatgacagccgtgggtttaagcgaaatggccgctgaagctgcataccaaacaggggctgaccaggcaagcattacagcgcgcaaccatatacagttggtgaaacttcaggtggaggaggtgcatcaattaagcaggaaggctgagacaaaactcgcggaggcccagatcgaagagctgagacagaaaactcaagaggagggcgaagaaagagccgagagcgaacaggaggcctacctacgtgaagat

SEQ ID NO: 32668 - DNA, 717 bp, synthetic construct
  misc_feature 1..717: note = Description of Artificial Sequence: Synthetic coding sequence
  source 1..717: mol_type = other DNA
atggcggcgcttaaaagttggctatccagatccgttacttcattttttcgctatagacaatgcctctgtgtccctgtcgtggccaacttcaaaaagcggtgcttttccgagctcattagaccatggcacaagactgtgacgatcgggtttggagtgactctgtgcgcagtgccgattgctcagaaatcagaaccccactcactgagtagtgaggccctgatgcggcgggccgtgagcttagtcacggactccactagcaccttcctctctcagacaacttatgctctgatcgaagcaatcacagagtacacgaaggccgtgtacaccttaacctctctgtacaggcagtatacatctttactgggaaagatgaacagtgaagaagaggatgaggtgtggcaggtaatcatcggagccagagccgagatgacctctaagcatcaggagtatttaaaactcgaaactacatggatgacagccgtggggttgtcagagatggctgcagaggcggcctaccagaccggggctgatcaggcctctatcacagccaggaaccacatccagctggtaaagctacaggtggaagaggtacaccaactctccagaaaggctgaaacaaagctggcagaggcccagattgaagagcttcgtcagaaaacacaggaggaaggtgaggagcgggctgaaagtgagcaagaagcctatttgcgcgaggac

SEQ ID NO: 32669 - DNA, 717 bp, synthetic construct
  misc_feature 1..717: note = Description of Artificial Sequence: Synthetic coding sequence
  source 1..717: mol_type = other DNA
atggcagctttaaaaagttggttgtctcgttcagttacctctttcttcagatatagacagtgtctttgcgtcccagtcgttgcaaacttcaaaaaaagatgtttctctgaattgattagaccctggcacaagactgtaacaattggttttggtgttactttatgtgccgtccccattgctcaaaagagtgaaccgcactctctaagttctgaagcccttatgagacgtgccgtttcgctcgttactgactcaacttctacctttctgtctcaaactacgtatgcgttgattgaagcaatcactgaatataccaaggctgtttacacactcacctctctttatcgtcaatacacttctcttctgggcaagatgaactccgaagaagaagatgaagtttggcaagtaatcattggggcacgtgctgagatgacatcgaagcatcaagaatatctgaaacttgaaacaacttggatgacggcagtggggctgtctgaaatggccgctgaggcagcctatcaaactggagcggatcaagcttccattactgcgcgaaatcatattcagcttgttaagttacaagtggaagaagtccatcaattgagtagaaaagcagaaacaaaattggcagaagctcaaattgaagagctacgccagaagacacaggaggagggagaagagcgagccgagtcggagcaagaggcgtacttgagagaagat

SEQ ID NO: 32670 - DNA, 717 bp, synthetic construct
  misc_feature 1..717: note = Description of Artificial Sequence: Synthetic coding sequence
  source 1..717: mol_type = other DNA
atggcggcacttaaatcttggctttcacggagcgttacttctttcttcaggtatagacagtgcctctgcgtcccagtagttgcaaactttaaaaaaagatgctttagcgaacttatcaggccctggcataaaaccgtaaccattggatttggcgtaaccctttgcgctgtgcccatcgctcaaaaaagcgaaccccacagcctttcttctgaggcccttatgcggcgcgcagttagcctggtcaccgactccacttctaccttcctcagccagaccacttatgctctgatcgaggctatcactgaatacactaaggcagtgtacacactgacctcgctgtatcgtcagtacacttctctactgggaaaaatgaatagcgaggaagaggacgaggtctggcaagtcattatcggggccagggccgaaatgacttcgaagcatcaagaatatcttaagcttgaaactacttggatgaccgcagtgggactgtctgagatggcggctgaagcagcctatcagaccggcgcggaccaggcttctataaccgccaggaaccatatccagcttgttaaattgcaagtggaggaagtgcatcaactcagtagaaaagctgagactaagctggcagaagctcaaattgaagaacttcggcagaagacccaggaagagggagaagagagagcagaatccgaacaagaggcctacctgagggaagac

SEQ ID NO: 32671 - DNA, 717 bp, synthetic construct
  misc_feature 1..717: note = Description of Artificial Sequence: Synthetic coding sequence
  source 1..717: mol_type = other DNA
atggccgccttgaaatcctggctgtcccgttctgtgacttccttcttcagataccgccagtgcctttgcgttccagtcgtggctaatttcaagaagcgctgtttttccgaactgattcggccgtggcataagaccgtgactatcggcttcggcgttaccctgtgcgcggttcccatcgctcagaagtctgagccgcactcgctctcttccgaggctctgatgagaagggccgtttccctggtgaccgatagcacctccactttcttgagccagaccacatatgctctaatcgaagcaatcaccgagtacacaaaggcagtgtacaccctgactagtctgtaccggcagtatacttcactcttggggaaaatgaactcggaagaggaggacgaggtatggcaggtgattattggagctcgtgccgagatgacctccaagcaccaagagtatctgaagctggagaccacgtggatgacagccgtggggctgtctgagatggcggcggaagctgcctatcagacaggcgccgaccaggctagtatcacagcccgcaatcacatccagctcgtcaagttacaggtggaagaggtgcatcagctgtctagaaaggctgaaacaaaactcgccgaggcacagatcgaagagctgaggcagaaaacacaagaagaaggcgaagagcgagctgagtctgagcaagaggcctatttgcgcgaggac

SEQ ID NO: 32672 - DNA, 717 bp, synthetic construct
  misc_feature 1..717: note = Description of Artificial Sequence: Synthetic coding sequence
  source 1..717: mol_type = other DNA
atggccgcattgaagtcctggctttcacggtccgtcactagcttcttccggtaccgtcaatgcctgtgtgtgcccgtcgtcgcaaactttaagaaaaggtgtttctctgaacttatccggccctggcacaaaaccgtgaccattggctttggagtgaccctctgcgcagtgccaattgcacaaaagagcgagcctcatagcctgagctcagaggcgctgatgcggagggctgtgagcctggtcaccgattcgacctcgacttttctgtcacaaaccacctacgcgctcattgaagcaatcaccgaatacaccaaagctgtgtacactctcacctcgctttaccgccaatacacttccctgctgggaaagatgaattccgaggaggaggatgaggtctggcaggtgattatcggggcgagggcagagatgacttccaagcaccaagaatacctgaagctggagacgacgtggatgactgcagtgggactttccgaaatggcagccgaagcggcataccaaacgggagcagaccaagcatcgattaccgcgaggaatcatatccagcttgtgaaattgcaggtggaagaagtgcatcagttgtcccgaaaggccgaaaccaagctcgcagaagcccaaattgaagagctgagacagaaaactcaggaagagggagaagaacgtgcagaatcggaacaagaagcctacctgcgagaggac

SEQ ID NO: 32673 - DNA, 717 bp, synthetic construct
  misc_feature 1..717: note = Description of Artificial Sequence: Synthetic coding sequence
  source 1..717: mol_type = other DNA
atggcagcacttaagtcctggctgtccagaagcgtcacctccttctttaggtaccgccaatgcctctgcgtgcccgtggtcgccaactttaagaagcggtgtttttcggaacttatccggccttggcataagactgtcactattggttttggggtgactctctgtgcagtgcctattgcccagaagtcagaaccgcactcactctcgtccgaggccctgatgagaagggcggtgagcctggtgaccgactccacctcaaccttcctgtcgcagacgacttatgccttgatcgaggcaatcactgagtacaccaaagcggtctataccctgacgagcctgtaccgacaatatacgtcgttgctggggaagatgaacagcgaagaggaggatgaagtctggcaagtgataatcggagcaagagcggaaatgacctcaaaacatcaagagtaccttaagctggaaaccacttggatgactgctgttggtctgtcggagatggccgccgaagcagcttaccaaaccggagcagaccaggctagcattacggcacgcaatcatattcagttggtgaagttgcaggtggaagaagttcatcaactgtcgaggaaggcggagactaaacttgcggaagcccagatagaagaacttcggcaaaaaacccaggaagaaggcgaggaacgcgcggagtcagaacaagaggcatatctgcgagaggat

SEQ ID NO: 32674 - DNA, 717 bp, synthetic construct
  misc_feature 1..717: note = Description of Artificial Sequence: Synthetic coding sequence
  source 1..717: mol_type = other DNA
atggctgcactgaagtcctggctgtccagatctgttacatctttcttccgatatcggcagtgtctctgcgtgccagtggtagccaactttaagaaacgctgcttttcagaactgattcggccatggcataagaccgtgacaattggtttcggagtaacattgtgcgcagttcctatagcacagaagagtgaaccacattcactgagttccgaggcccttatgcgaagggccgtgtccctcgtgaccgactctactagtactttcctttctcagaccacctacgccttgattgaagccatcacggaatacacaaaggctgtttacacactgacttctctttatcgacagtacacctccttgctgggcaagatgaattcagaggaggaggacgaagtgtggcaagtgatcattggcgcgagagctgaaatgacctctaaacaccaagagtaccttaaactggagactacttggatgacagctgtggggctctctgagatggcagccgaggcggcctaccaaacgggcgcagaccaggctagtatcactgcaagaaatcatattcagctggtcaagctccaagtagaagaggtgcatcagctgtctcggaaggccgaaacgaagctggccgaggcccaaatagaggagcttagacagaaaacgcaagaggagggggaagaacgggccgaatccgaacaggaggcctatctgcgggaggat

SEQ ID NO: 32675 - DNA, 717 bp, synthetic construct
  misc_feature 1..717: note = Description of Artificial Sequence: Synthetic coding sequence
  source 1..717: mol_type = other DNA
atggccgcgcttaagagctggctgagccggagcgtgacctcttttttccgctaccgccaatgcttgtgcgtccctgtggtagctaacttcaagaagcggtgcttttctgagctgatccggccgtggcacaagactgttaccatcggattcggggtaaccctctgtgcggtgccaatcgcccagaaatcagagccgcattcgttgtcgtcggaggcactcatgagaagagccgtgtcgctcgtcacggactcaaccagtactttcctttcacaaacgacttacgccctgattgaagccatcaccgaatacaccaaggctgtgtacaccctcacctccctgtaccggcagtacacttcactgctgggaaagatgaatagcgaggaagaggatgaagtgtggcaggtgattatcggggcaagggccgagatgacgagcaagcaccaggagtatctgaaactcgagactacttggatgaccgccgtgggactgtccgagatggcggcggaagctgcctaccagaccggcgcagaccaggcctcaatcaccgcccgcaaccatatccaactcgttaagctccaggtcgaagaggtgcaccaattgtcgcgcaaggcggagactaagctggcggaagcgcagatcgaagagttgcgccaaaaaactcaggaagaaggcgaggagcgagcagaatccgaacaagaagcatacctccgtgaagat

SEQ ID NO: 32676 - DNA, 717 bp, synthetic construct
  misc_feature 1..717: note = Description of Artificial Sequence: Synthetic coding sequence
  source 1..717: mol_type = other DNA
atggcagcgctcaagtcgtggctgtcccgctcggttacttcgttcttccgctaccgccaatgtctctgcgtaccggtggtcgcgaacttcaagaagcgctgtttctcagagctgattaggccatggcacaaaactgtcaccatcggatttggagtgactctgtgcgccgtcccgattgcacaaaaatcagagccacatagcttgtcgtctgaggcgctgatgcgaagggccgtgtcgctcgtgaccgacagcacctcgacctttctttcacagacgacctacgcgctcatcgaggccatcactgaatatactaaggcagtatacaccctgaccagcttgtaccgccagtacacttcgctgctggggaagatgaattcagaggaagaagatgaagtgtggcaggtgatcatcggtgcccgcgcggaaatgacttcgaaacatcaagaatacctgaagttggagacgacctggatgaccgctgtcgggctgtctgagatggctgccgaagccgcctaccagaccggagccgaccaagcctcaatcaccgccagaaaccacattcagctcgtgaagctgcaggtggaagaagtgcaccaactgtcgcgcaaagcagaaactaagctggcagaagcacagatcgaggagctccggcaaaagactcaagaggagggagaagagcgcgcggagtcagaacaggaggcgtacctgcgggaggat

SEQ ID NO: 32677 - DNA, 717 bp, synthetic construct
  misc_feature 1..717: note = Description of Artificial Sequence: Synthetic coding sequence
  source 1..717: mol_type = other DNA
atggcagcacttaaatcatggctgtcccggagcgtcacctcatttttcagatacaggcagtgcttgtgtgtgcccgtggtggcaaactttaagaagagatgtttttccgaacttattagaccatggcataagaccgtcactattggctttggagttactctttgtgccgtgccaatcgcccagaaatcagaaccacactccctttcaagcgaagctctgatgcggcgggccgtgtcgcttgtgactgactcgaccagcacttttctgtcgcagactacctacgcactcattgaggcaattaccgagtacactaaggcagtgtacaccctgacctcgctttaccgccaatacactagccttttgggtaaaatgaatagcgaggaagaagatgaagtctggcaagtgatcattggggcacgggctgagatgactagcaagcatcaggaatacctgaagctggaaactacctggatgaccgcagtgggactgtcagaaatggcagctgaagcagcataccagactggagccgatcaagcatctatcactgcacgaaaccacattcaactggtcaagctgcaagtcgaagaagtccatcagctctccaggaaggcagaaactaaactcgccgaagcacagatcgaagagcttcgacagaaaactcaggaggagggagaggaacgcgcggaatcagaacaggaggcatacttgagagaggac

SEQ ID NO: 32678 - DNA, 717 bp, synthetic construct
  misc_feature 1..717: note = Description of Artificial Sequence: Synthetic coding sequence
  source 1..717: mol_type = other DNA
atggccgcgctgaagtcctggttgtccaggagcgttacttctttcttccgatacaggcagtgtctgtgcgtaccagtggtggccaattttaaaaagcgttgcttttcagagctgatccgtccctggcataagacagtgacaatagggttcggagttaccctctgtgccgtccccatcgcgcaaaaatccgagccacattctctctcttcagaggcccttatgagacgcgccgtgtccctggttacagattccacatccactttcctgagccagacgacttatgccctgattgaggcaatcacagaatacaccaaagcagtgtatactttgacaagtctctataggcagtacacttctctgctcggaaagatgaattctgaagaagaggacgaggtttggcaggtgattattggagctcgggctgagatgacaagcaagcatcaggagtatctgaaactggagactacctggatgacagctgttggactgtctgagatggcagccgaagcggcataccagaccggcgccgaccaggcttccataaccgcccggaaccacatacagcttgtgaagctccaggtcgaggaggtacatcagctttcgcgcaaggctgagacgaaactcgctgaggctcagattgaggagctgagacagaaaactcaggaggagggggaggaacgggccgagagcgagcaggaggcctacctgagagaggat

SEQ ID NO: 32679 - DNA, 717 bp, synthetic construct
  misc_feature 1..717: note = Description of Artificial Sequence: Synthetic coding sequence
  source 1..717: mol_type = other DNA
atggccgcgcttaagtcttggctgagtcgatctgtcacgtcgtttttccggtacagacaatgcctctgtgtgcccgtggtcgctaactttaagaagagatgttttagcgaactgataagaccatggcataaaactgtgactatcggttttggagtgacgctgtgtgccgtgcctattgcccagaagagcgaaccgcattctctctcaagcgaggcactcatgcgtcgggcggtgagcttggtgactgattccaccagtaccttcctctcgcagacgacctacgcgctcatagaagcgattactgaatacacgaaggctgtttacactctgacttccctttataggcagtacacctcgcttcttggtaagatgaacagcgaagaagaggatgaagtgtggcaggtgattattggtgccagggcagaaatgacctcaaaacaccaggaataccttaaactcgagactacctggatgaccgcagtcgggctgtcagaaatggcagccgaagcggcctaccaaaccggagcagaccaggctagcatcactgcaaggaatcatattcaacttgtcaagctgcaagtcgaggaggtgcaccaattgtcacgcaaggcggaaaccaaacttgcagaagcacagatagaagagttgagacaaaagacccaagaagagggagaagaacgagccgaaagcgagcaggaggcatacctgcgggaggac

SEQ ID NO: 32680 - DNA, 717 bp, synthetic construct
  misc_feature 1..717: note = Description of Artificial Sequence: Synthetic coding sequence
  source 1..717: mol_type = other DNA
atggccgcattgaaaagctggctgtccaggtcagtaacttccttcttccgctaccgccaatgcttatgcgtccccgtagtcgccaacttcaagaaaaggtgtttcagcgagctgattaggccttggcacaaaaccgtaacgatcgggttcggggtgaccctatgcgcagtcccaatagcccagaaaagcgaaccccattccctgtcctctgaagctcttatgcgcagagccgtttctctcgtcaccgattccacctcgacattcctgagtcagacgacatatgctctcatcgaggctataactgaatacacaaaggcggtgtacaccctaacatccctgtataggcagtacaccagcctactgggaaagatgaactccgaggaagaggatgaagtttggcaggtgatcattggcgctagggcggagatgacttccaagcaccaggaatacttgaaattggaaacaacctggatgacggccgtggggctgagcgagatggctgcagaggctgcataccagactggggctgaccaggccagtatcaccgctcgtaaccatatccagctcgttaagttacaggtagaggaggtgcatcagctcagccggaaagccgagactaagctggctgaggcacaaatcgaggagctcagacagaagacacaggaagagggagaagaaagagcggagtcagaacaggaggcctatcttagagaggac

SEQ ID NO: 32681 - DNA, 717 bp, synthetic construct
  misc_feature 1..717: note = Description of Artificial Sequence: Synthetic coding sequence
  source 1..717: mol_type = other DNA
atggccgcactgaaatcctggttgtcgaggtccgtgacctccttcttcagatatcgccagtgcttgtgcgtcccagtggtcgccaactttaagaagcgctgtttctctgaactgattagaccctggcataaaacagtgaccatagggtttggggtgacactgtgcgcggtgccaatagcccagaagagtgagcctcacagtctgtcaagcgaagctctaatgcgacgggctgtctcattggtcaccgattccacatctaccttccttagtcagactacctacgctctcatcgaagctataacggagtataccaaagctgtttataccctaacatccctgtatcggcagtatacgtccctgttagggaaaatgaattcagaggaggaggacgaagtgtggcaggtgatcataggcgcacgagctgagatgaccagcaagcatcaggaatatctgaagctggagaccacatggatgactgctgtcggactgagtgagatggccgccgaagccgcctaccagaccggagcggatcaggcctccattactgctcggaatcacattcagctggtgaaactgcaggttgaggaggtacaccagctttcccgcaaggcggaaacgaagctggccgaggctcaaatcgaagagctccgacagaaaacccaggaagagggtgaggaacgagccgaaagcgaacaggaggcctaccttagggaggac

SEQ ID NO: 32682 - DNA, 717 bp, synthetic construct
  misc_feature 1..717: note = Description of Artificial Sequence: Synthetic coding sequence
  source 1..717: mol_type = other DNA
atggccgctctcaaatcctggctgagccggtctgtgacatctttcttccgatacagacagtgcctctgcgtcccagtggtcgctaattttaagaaacggtgttttagcgagttgattaggccttggcacaagaccgtgaccattggatttggagtcacactctgcgcagttcctatcgcacagaagagcgaaccacactccctgagtagcgaagcactaatgcgaagggctgttagtctggttaccgattccacaagcacttttctaagccagactacctacgctctgatcgaagctatcacagagtacaccaaggccgtttatacactgacctcactatacaggcagtacacatccctgctagggaagatgaattccgaggaagaggatgaagtctggcaggtgataataggggctcgtgccgagatgacctcaaagcaccaggaataccttaagttggaaaccacatggatgaccgccgttgggctaagcgaaatggccgcagaagctgcttatcaaaccggggctgaccaggcttctataacagctcgcaatcatatccaattggtcaagttgcaggtggaagaggtgcatcagctcagtagaaaagctgaaaccaagctcgcagaggcccagatcgaagaactccgacaaaagacacaggaggagggggaagagagagctgaaagtgagcaggaggcttacctgagggaagac

SEQ ID NO: 32683 - DNA, 717 bp, synthetic construct
  misc_feature 1..717: note = Description of Artificial Sequence: Synthetic coding sequence
  source 1..717: mol_type = other DNA
atggccgcgctgaaatcgtggctctcccggtccgtcacctccttcttccggtacagacagtgcctttgcgtgccggtggtggctaacttcaagaagagatgtttctccgagctcatccgtccgtggcacaaaactgtgaccatcggattcggagtgactctgtgtgctgtgccaatcgcacagaagagcgaaccgcactcactttcttcggaggcgttgatgcgccgcgccgtcagcctcgtgaccgactcaaccagcacctttctgtcacagaccacttacgcactcatcgaagccatcactgagtacaccaaggccgtgtacaccctgacttccctgtaccgccagtataccagcctgctgggaaagatgaactcagaagaagaagacgaagtctggcaggtgatcatcggagcccgcgccgagatgacttccaaacaccaagagtacctgaagctcgaaaccacctggatgacggcggtgggcctgtcagaaatggccgcggaggcggcctaccagactggagccgaccaagcgtcaatcactgcccgaaatcatatccaactggtgaagctgcaggtggaagaagtccatcaattgagcaggaaggcggaaactaagctggcggaggcgcaaatcgaggagttgcggcagaagactcaagaagaaggcgaagaacgcgccgagagcgaacaggaggcttacctccgggaagac

SEQ ID NO: 32684 - DNA, 717 bp, synthetic construct
  misc_feature 1..717: note = Description of Artificial Sequence: Synthetic coding sequence
  source 1..717: mol_type = other DNA
atggcggcgctgaaaagctggctgagtagatctgtgacgagctttttccggtacaggcagtgtttgtgcgtgcccgtggtcgctaattttaaaaaaaggtgcttctctgagctaattaggccttggcacaaaaccgtgactatagggtttggcgtaaccctttgtgccgttccgatcgcccagaaatcagaaccacactctctgtccagcgaagccctcatgcgccgagcggtcagcttggtcacggattcaacaagcactttcttaagtcagaccacatatgccctaattgaggcaatcacagaatacaccaaagcggtgtatacactgacctccctatatcggcagtacacctccctgctgggaaaaatgaactccgaggaagaagatgaggtgtggcaggtcatcatcggcgctcgagctgagatgacatcaaagcatcaggagtatttgaagttggagaccacttggatgacggcagtgggactttctgagatggccgccgaggccgcttatcagacaggtgcggatcaagcatccatcaccgctaggaaccacatacaactggtaaaacttcaggtggaagaagtgcaccagctgtcaaggaaagctgagacaaagctggcagaagcccagattgaggagctcaggcagaaaacccaggaagaaggagaagaacgcgcagaaagtgagcaagaggcttatctccgggaagat

SEQ ID NO: 32685 - DNA, 717 bp, synthetic construct
  misc_feature 1..717: note = Description of Artificial Sequence: Synthetic coding sequence
  source 1..717: mol_type = other DNA
atggcagccttgaagagctggctgtcgagaagcgtgactagcttctttaggtaccggcagtgcctgtgcgttccggtggtggcgaatttcaaaaagcgctgcttttccgaactgatccggccctggcataaaaccgttaccatcggcttcggagtcactctgtgtgcagtcccgattgctcagaagtcagaaccgcattcattgtcatccgaggcgctcatgcgccgggctgtctccctcgtcaccgacagcacttctacgttcctttcgcagactacgtacgcgctgatcgaagcgatcaccgaatacactaaagccgtgtacacgctgacctcgctgtacagacagtacacgtcactgctcggcaagatgaatagcgaagaggaggacgaagtctggcaggtgatcatcggtgcgagagcggagatgacctcgaaacatcaggagtatcttaagctggaaacgacttggatgacggcagtgggactctccgagatggccgcggaggccgcataccagactggggccgatcaggcgtcaattacggcgagaaatcacatccaacttgtgaagctgcaagtggaggaagtgcaccagctctcccggaaggccgagacgaagctcgctgaagcccagatcgaagaactgaggcaaaagacgcaggaagagggagaagagcgagcagaatcggaacaagaggcatacttgcgggaggat

SEQ ID NO: 32686 - DNA, 717 bp, synthetic construct; identical to SEQ ID NO: 32663
  misc_feature 1..717: note = Description of Artificial Sequence: Synthetic coding sequence
  source 1..717: mol_type = other DNA

SEQ ID NO: 32687 - DNA, 717 bp, synthetic construct
  misc_feature 1..717: note = Description of Artificial Sequence: Synthetic coding sequence
  source 1..717: mol_type = other DNA
atggcggcgctaaaatcgtggttatcgcgatcggtaacgtcgttttttcgatatcgacaatgtttatgtgtaccggttgtagcgaattttaaaaaacgttgtttttcggaattaatacgaccgtggcataaaacggttacgataggttttggtgttacgctatgtgcggttccgatagcgcaaaaatcggaaccgcattcgctatcgtcggaagcgctaatgcgtcgtgcggtttcgttagtaacggattcgacgtcgacgtttctatcgcaaacgacgtatgcgttaatagaagcgataacggaatatacgaaagcggtatatacgttaacgtcgttatatcgacaatatacgtcgttattaggtaaaatgaattcggaagaagaagatgaagtttggcaagtaataataggtgcgcgtgcggaaatgacgtcgaaacatcaagaatatttaaaattagaaacgacgtggatgacggcggttggtctatcggaaatggcggcggaagcggcgtatcaaacgggtgcggatcaagcgtcgataacggcgcgaaatcatatacaactagtaaaactacaagttgaagaagtacatcaattatcgcgtaaagcggaaacgaaactagcggaagcgcaaatagaagaattacgtcaaaaaacgcaagaagaaggtgaagaacgagcggaatcggaacaagaagcgtatctacgagaagat

SEQ ID NO: 32688 - DNA, 717 bp, synthetic construct
  misc_feature 1..717: note = Description of Artificial Sequence: Synthetic coding sequence
  source 1..717: mol_type = other DNA
atggcggcgttgaagagctggctttcaaggagcgtcacgtcattttttaggtaccgtcaatgcttatgcgtcccagttgttgctaactttaaaaagagatgcttttcagaactcatacgaccatggcacaaaacagtgacaatcggttttggagtaacactgtgtgctgtgccgatcgctcagaaatctgaaccgcattccctcagctcagaggctcttatgcgccgggcggtgtccttagtcaccgattcaacgtcgacattcctttcacagacgacttacgctctaatcgaggctatcacagaatatacaaaggcagtttataccctgacttctctttatcggcagtatacatctctcctgggcaaaatgaacagtgaagaggaggatgaagtctggcaggttataatcggtgctagggcggaaatgacgagcaagcatcaggaatacctgaaacttgagactacttggatgacagcggtcggtctctctgaaatggcagcagaagccgcctaccagactggtgccgaccaagcctcgattactgcacgtaatcatattcaattggttaaactgcaagtagaggaagttcatcagttatccaggaaagccgaaaccaaattggctgaggctcaaatagaggagcttagacaaaagacgcaggaggagggcgaagaaagagcagaatcagaacaagaggcatatctccgggaggac

SEQ ID NO: 32689 - DNA, 717 bp, synthetic construct
  misc_feature 1..717: note = Description of Artificial Sequence: Synthetic coding sequence
  source 1..717: mol_type = other DNA
atggccgctctaaagagctggctcagtaggtccgtaacatccttttttcgatatcgacagtgcctctgcgtgcctgtggtcgccaacttcaaaaagcgatgctttagcgaactgattagaccttggcacaagacggtgacaatcggcttcggagtgactctgtgtgcagtccctatcgctcaaaaatcggaacctcattctctgtcctcagaagcgctgatgaggcgcgctgtatctctggtaacagactctacttccaccttcctcagtcagaccacatatgccctaattgaggccattacggagtacaccaaggcggtctatacattaacatccctgtataggcaatatacaagtttgctgggaaaaatgaattctgaggaggaggatgaagtgtggcaagtaatcatcggagcaagagcagagatgacatccaaacatcaggaatacctgaagctcgaaaccacatggatgaccgctgtgggactgtcggagatggctgcggaggccgcatatcaaaccggcgcagaccaggcctccattacagcgcgcaaccacattcagctggttaagctgcaagtggaggaggtgcatcaactctcccgcaaggctgagactaagcttgccgaggcgcagatcgaggaattgagacagaagacccaggaggagggggaggagagggcagagtctgaacaggaggcctacctgcgggaggat

SEQ ID NO: 32690 - DNA, 717 bp, synthetic construct
  misc_feature 1..717: note = Description of Artificial Sequence: Synthetic coding sequence
  source 1..717: mol_type = other DNA
atggccgcgctgaagtcctggctctcccggtcggtgacttcctttttccgatatcgccagtgtctctgtgtgcctgtcgttgccaatttcaagaagcggtgcttctcggagcttatccggccttggcataagaccgtgactatcggttttggagtgaccctgtgcgccgtcccaatcgcccagaaatcagaaccgcatagcctgagctcggaggcgctcatgcgccgggcagtctcgctggtcactgatagcacgagcaccttcctgtcgcagaccacctatgctctgattgaagctatcaccgaatacaccaaagcagtgtatactctgacctcgctgtaccgacagtacacctccttgcttggaaagatgaactcggaagaggaggatgaagtctggcaggtcattatcggtgcacgtgcagagatgacgtcaaagcaccaggaatacctcaagctggagacgacgtggatgaccgccgtgggcctgagcgaaatggctgctgaagcggcataccagactggggctgatcaggcctcaatcaccgcccgcaatcacatccaacttgtgaagctccaagtggaagaagtccatcaactctctcgaaaggccgaaactaaattggccgaagcgcagattgaagaattgagacagaaaactcaagaggagggggaggaacgcgcagagtcggaacaagaagcatacctgagagaggac

SEQ ID NO: 32691 - DNA, 717 bp, synthetic construct
  misc_feature 1..717: note = Description of Artificial Sequence: Synthetic coding sequence
  source 1..717: mol_type = other DNA
atggccgccctcaaatcttggctgtctcggagtgtaacatcgttcttccgataccggcaatgtttgtgcgtgccagtggttgccaacttcaaaaaacgctgtttcagcgaactcatcagaccgtggcacaagactgtgactatcggatttggcgtcacattatgtgcggtgcccatcgcccagaaatcagaaccccatagcttgagtagtgaagctctcatgcggcgtgcagtaagcctggttaccgactccacaagcacttttttaagccaaacgacctatgcccttattgaggccatcacggagtataccaaagccgtctataccctgaccagtctgtaccgtcaatacactagcctcttagggaaaatgaactcggaggaggaggatgaagtctggcaggtcatcatcggagcaagagccgagatgacgagcaaacaccaggaatatctgaaacttgagacaacttggatgactgctgtcgggctgtctgaaatggccgccgaggccgcgtatcagaccggcgccgatcaggcctctattaccgcccgcaatcacatccagctcgttaagctgcaggtggaggaggtacatcagttgtctagaaaggctgagacaaaattggcagaggcgcaaatcgaggagctgagacagaagacgcaggaggaaggagaggagagggcagagtccgagcaggaagcttatctgcgtgaggac

SEQ ID NO: 32692 - DNA, 717 bp, synthetic construct
  misc_feature 1..717: note = Description of Artificial Sequence: Synthetic coding sequence
  source 1..717: mol_type = other DNA
atggctgctctgaaatcgtggctgtcccgttccgtgacttcattctttaggtaccgtcaatgcctgtgcgtccccgtggtggcaaatttcaagaagcgatgtttttccgaattgatccgaccctggcataaaactgtgaccatcgggtttggggtcactctttgtgcggtcccaattgcacagaagtccgaacctcactcactctcgtccgaggcactgatgcgccgtgccgtgtcactggtcactgactcaacctcgactttcctgtcccagaccacctacgcattgattgaggcaattaccgaatacactaaggccgtctacacccttacgtcgctttaccgccagtacacctccctgctcggtaagatgaactcagaggaagaagatgaagtctggcaggtgattataggagcaagagcggaaatgacttcaaagcatcaagagtacttgaaattggaaaccacttggatgaccgcagtgggcctgtcggaaatggcagcagaagcagcctaccaaaccggggccgatcaggcatcgatcacggctcggaaccacatacagttggtgaagctgcaggtggaggaggtgcatcaactcagtagaaaagctgaaaccaagttggcggaggcacaaattgaagaacttcgacaaaagactcaggaggaaggtgaagagcgcgcagagagcgaacaggaagcctatctcagagaagat

SEQ ID NO: 32693 - DNA, 717 bp, synthetic construct
  misc_feature 1..717: note = Description of Artificial Sequence: Synthetic coding sequence
  source 1..717: mol_type = other DNA
atggcggcgttaaagtcctggctctcgcgtagtgttacctcctttttccggtacaggcaatgcctctgcgtacctgttgtcgccaactttaagaagagatgcttctcggagcttatccgtccctggcacaagacagtgaccattggtttcggtgttaccctgtgtgctgtgccaatcgcccagaagtcggagccccactccctttcatcggaggctctgatgcgccgcgctgtttctctcgttaccgatagcacttctacgttcctgtcacagacaacatatgctctgatcgaggcgatcaccgaatacactaaggctgtctacactctcacctccttgtatcgtcagtacaccagtctactgggtaagatgaactccgaggaagaggacgaagtgtggcaggttatcattggtgcccgggctgagatgacctccaagcaccaggagtacctgaaactcgagactacctggatgaccgcggtcggtctcagcgagatggccgccgaggcggcgtatcaaaccggtgcagatcaggcatctatcactgcgcgcaaccatatccagcttgtcaagctccaggtggaggaggtgcatcagctgtcccgaaaggcagagaccaaactggctgaggcccagatcgaggaactccggcagaagactcaagaggagggcgaggaaagggctgagtccgagcaggaagcctatcttcgggaggac

SEQ ID NO: 32694 - DNA, 717 bp, synthetic construct
  misc_feature 1..717: note = Description of Artificial Sequence: Synthetic coding sequence
  source 1..717: mol_type = other DNA
atggcggcccttaagagctggctctcccggtcagtcacttcctttttcaggtacagacaatgcctttgtgtcccagtggtggcgaactttaagaaaagatgcttctccgaactcatccggccttggcataagaccgtgaccatcggcttcggtgtgaccctctgcgcggttcctatcgcgcagaaatcggagccgcactcactgtccagcgaagcattgatgcgccgcgcagttagcctcgtgactgactcaacgagcactttcctgtcgcaaactacctacgccctgatcgaggctattacggagtacaccaaggccgtgtacactcttacctcactttaccgacagtacacctccctgctgggtaaaatgaatagcgaggaggaggacgaagtgtggcaggtgatcatcggagcgcgcgcagagatgacctcgaaacaccaggagtaccttaaactggaaaccacctggatgactgccgtcggcctgtcggagatggccgccgaggctgcttaccagactggtgccgaccaggcaagcattactgccagaaatcacatccagctggtcaagctccaagtggaagaagtgcatcaactcagccgcaaggctgaaactaaactggctgaagcgcagatcgaggaactgcgccagaaaacccaggaggaaggagaggagcgagccgagagcgagcaagaggcctacctcagggaagat

SEQ ID NO: 32695 - DNA, 717 bp, synthetic construct
  misc_feature 1..717: note = Description of Artificial Sequence: Synthetic coding sequence
  source 1..717: mol_type = other DNA
atggctgcactgaagtcatggcttagccgatctgttaccagcttcttccgatatcggcaatgcctttgcgtgccagtggtggccaacttcaagaaaaggtgtttttctgaactcattcggccttggcacaaaacagtcacaatcgggttcggtgtcacactgtgtgctgttccaattgcacaaaaatccgaaccgcactccctgagttcagaggccctcatgcgccgcgccgtcagcctcgtaacagattcaactagtacgtttctcagccagacaacttatgcactgattgaggcaattactgaatacacaaaggcagtctacaccctgacctccctctacaggcagtacacttcattgcttggcaagatgaacagtgaggaggaagatgaggtgtggcaggttattataggtgcaagggccgagatgacatctaagcatcaggagtacttgaagcttgagacgacctggatgaccgccgtgggactgagtgagatggccgcagaagctgcttaccagacaggcgccgatcaggcctccataactgctcgcaatcacatccagctggtcaagctccaggtcgaggaggtgcaccagctgtctcgcaaggctgagaccaagcttgcggaagcccagatcgaagaactgcggcagaaaactcaggaggagggagaagagcgggcagaatcagagcaggaggcttacctgagggaagac

SEQ ID NO: 32696 - DNA, 717 bp, synthetic construct
  misc_feature 1..717: note = Description of Artificial Sequence: Synthetic coding sequence
  source 1..717: mol_type = other DNA
atggccgcgctgaagtcatggcttagccgcagcgtgacctcgttttttcggtacaggcagtgtctgtgcgttcctgtggtcgccaatttcaaaaagaggtgcttttccgaattgataaggccgtggcataagaccgtgactattggttttggtgttaccctctgtgccgtgccaatcgcacagaagtcggagcctcattccctgtcatcagaagcacttatgagaagagcagtttcccttgtgaccgactcaacttccaccttcctgtcccagaccacctacgctcttattgaagccattaccgaatacactaaggcagtctacacgctgacctcgctctaccgtcaatataccagccttctgggcaagatgaactcggaagaggaagatgaagtctggcaagtgataattggcgcaagagccgaaatgacctccaagcatcaagagtacttgaagttggagactacctggatgactgcagtcggtctttccgagatggccgcagaggcagcataccagaccggagcagatcaggcaagcatcaccgcgaggaaccacatccaactggtgaaacttcaggtggaggaagtgcaccaactgtcgagaaaggcagaaactaagctggccgaagcgcaaattgaagaactgcggcaaaagactcaagaggaaggggaggagagggccgaatcagaacaagaggcgtacctgcgggaagat

SEQ ID NO: 32697 - DNA, 717 bp, synthetic construct
  misc_feature 1..717: note = Description of Artificial Sequence: Synthetic coding sequence
  source 1..717: mol_type = other DNA
atggctgccctgaaatcatggctgtcccgcagcgtgacctccttttttcgctacagacagtgcctgtgtgtccctgtggtggccaatttcaagaaaagatgcttttcggagcttatccgcccctggcataagactgtcaccataggctttggtgtgactctgtgtgccgtccctattgcacagaaatcggaaccacactctttgagctcggaagcgctcatgcgtagggctgtgtcgcttgtcaccgactcaacttccacctttttgtcacagactacttacgccttgatcgaagccatcaccgagtacaccaaggccgtctacaccctgacctcactctaccgccagtacactagcctgctgggaaaaatgaacagtgaggaagaggacgaagtctggcaagtgattattggagccagagcggaaatgacctcaaaacatcaggaataccttaagttggagacgacctggatgactgccgtggggctgtccgaaatggcagcagaagcagcttatcagaccggagcggatcaggcatcaatcactgcaagaaaccacattcaactcgtcaagctgcaagtggaagaggtgcatcagctgtcgcgcaaagccgagactaagctggcagaggcacaaatcgaggaactccgccaaaaaacccaagaagaaggtgaagaacgggcagaatcagagcaagaagcctacctgagagaagat

SEQ ID NO: 32698 - DNA, 717 bp, synthetic construct
  misc_feature 1..717: note = Description of Artificial Sequence: Synthetic coding sequence
  source 1..717: mol_type = other DNA
atggccgctttgaagtcttggctcagccggtctgtaacctctttctttcgttaccgtcaatgcctgtgtgttcctgtggttgcgaattttaaaaagaggtgttttagcgaactcataaggccatggcataaaactgtcactataggttttggtgtgaccctgtgcgcagtgcccatcgcgcaaaagtctgagccccactccctttctagcgaggctttaatgcgaagagccgtttcgctggtgaccgacagtactagtacttttctctcccaaactacttacgcactgattgaagctatcactgagtacactaaagccgtatatacgttgactagcttatacagacagtacacatcactactgggtaagatgaattcagaagaagaggacgaggtctggcaggtcattataggcgctagagcggagatgacctccaaacaccaggagtacctgaagctcgaaaccacatggatgacagcagtcgggttatcagagatggccgcggaggcagcctatcagaccggcgcagatcaagccagcataaccgccagaaaccatatccaattggtgaaactgcaagtggaagaagtgcatcagctttctcgcaaggcggagactaagcttgccgaagcccagattgaagaactaaggcagaagacccaggaagagggcgaagaaagagccgagtccgaacaggaggcctacctcagggaggat

SEQ ID NO: 32699 - DNA, 717 bp, synthetic construct
  misc_feature 1..717: note = Description of Artificial Sequence: Synthetic coding sequence
  source 1..717: mol_type = other DNA
atggcagccctgaaatcatggcttagcagatcggttacctccttcttccggtaccgtcagtgtctgtgtgtgccagtggtcgcgaacttcaagaagagatgtttcagcgagttgatccgtccctggcataaaactgtcaccatcggatttggtgtgaccctttgtgcagtgcctatcgcacagaagtcggagccgcactcgctctcgtcggaagccctgatgcgaagagccgtgtcccttgtgactgactcgacttcgaccttcctctcgcaaaccacctacgcgctgattgaggcgatcactgaatacaccaaggccgtctacactctcacctccctgtaccggcaatacacttcgctcctgggcaagatgaatagcgaagaagaggacgaggtgtggcaagtgattattggggcacgggctgagatgacctccaagcaccaagagtatctgaagttggagacgacctggatgactgcagtcggtcttagtgagatggcagccgaggcagcctaccaaactggtgcggatcaggcatctatcacggcccggaatcatattcagctggtgaagttgcaggttgaagaagtgcatcaactttcaaggaaggccgaaaccaaactggcagaagcgcagatcgaggagcttagacagaaaacccaggaagaaggtgaggaaagagcagagagcgaacaagaagcatacctcagggaggat

SEQ ID NO: 32700 - DNA, 717 bp, synthetic construct
  misc_feature 1..717: note = Description of Artificial Sequence: Synthetic coding sequence
  source 1..717: mol_type = other DNA
atggcggccctgaaatcatggctctctcggtccgtcacctctttcttccggtacaggcagtgcctttgcgtcccggttgtagcgaacttcaagaagaggtgtttttcggagttgatcagaccatggcacaaaaccgtgacgatcggatttggcgtcaccttgtgcgccgtcccaatcgcccagaagtcggagccgcacagcctgtcgtcagaggcactgatgcgcagagcagtcagtttggtgaccgattccactagcaccttcctgtcgcagactacttacgctcttatcgaggccatcactgagtacaccaaggcagtgtacaccctgactagtctgtatagacaatatacttcactgcttggaaagatgaactccgaagaagaggacgaagtgtggcaggtgatcatcggggcgagagccgaaatgacctctaagcatcaggagtaccttaaactggaaaccacttggatgactgcagtcggactcagcgaaatggcggccgaggctgcataccaaacgggtgcagatcaggctagtattactgcccgaaatcacattcaactcgtgaagctgcaagtcgaagaagtgcatcaactctcgcgcaaggccgagacgaaactggcggaggcgcagatcgaagaactgcgtcaaaagacccaggaagagggagaggaacgggccgaatcagaacaagaagcctacctgcgggaggac

SEQ ID NO: 32701 - DNA, 717 bp, synthetic construct
  misc_feature 1..717: note = Description of Artificial Sequence: Synthetic coding sequence
  source 1..717: mol_type = other DNA
atggctgcactgaagtcttggcttagccgcagtgtcactagcttcttcaggtataggcagtgtctgtgcgtgccagtggtagcaaatttcaaaaaaagatgtttttccgagctaatacggccctggcataagacggtgacgatcgggttcggagtcaccctatgtgcagttcccatagctcagaaaagcgaaccccactcgttgtcgtccgaagcattgatgcgcagagccgtttctctggtaacagacagcactagtacgtttctcagccagacaacctatgccctcatcgaggccataaccgagtacacaaaggcagtgtataccttgacaagcttgtatcgacagtatacctctctgctaggcaagatgaactcggaagaggaggacgaggtgtggcaagttatcattggcgcacgcgccgaaatgactagcaagcaccaggaatacctcaagctcgaaacgacttggatgaccgccgttggcctgtcagagatggctgccgaagcagcttaccagacaggggctgatcaagcatctatcaccgcccggaaccacattcagctcgtaaagttgcaggttgaggaggtgcaccagctctctcgcaaggccgagacaaaactcgccgaagcccagattgaagagctgagacagaaaactcaggaggaaggcgaagagcgcgctgaaagcgaacaagaggcctacctcagggaagac

SEQ ID NO: 32702 - DNA, 582 bp, synthetic construct
  misc_feature 1..582: note = Description of Artificial Sequence: Synthetic coding sequence
  source 1..582: mol_type = other DNA
atgcacaagtggatcctcacatggattctgccaacactgctctatcgatcttgtttccacatcatctgcttagtaggcacgatttctctggcctgtaatgatatgacccccgagcagatggcgacgaatgtgaactgttcttccccagaacgccacactcggagctatgattacatggaaggaggggatatacgagtccgcaggcttttctgtcggacccagtggtatctgcgtatcgacaaacggggcaaggttaagggaacccaggagatgaagaacaactataatataatggaaatccgaactgtggcggttggcattgtggccattaaaggtgtagaatctgaattttatctggctatgaacaaagaggggaaactgtatgcgaaaaaggaatgtaatgaagattgtaattttaaggagcttattctcgaaaaccactataatacttatgcaagcgctaagtggactcacaacggaggagagatgttcgtagcattaaatcagaagggcatacccgtgagggggaaaaagacaaagaaggaacagaagactgcacattttctccccatggctataaca

SEQ ID NO: 32703 - DNA, 582 bp, synthetic construct
  misc_feature 1..582: note = Description of Artificial Sequence: Synthetic coding sequence
  source 1..582: mol_type = other DNA
atgcacaagtggatcttgacctggatcctgcccactctgctctaccgctcatgtttccacatcatatgccttgtgggtaccatctcactggcctgcaatgatatgactcccgaacaaatggctactaatgtcaactgcagctcgccagaaaggcataccaggagctacgactacatggaaggaggggatattagagtgcgccggctcttctgtagaacccagtggtaccttcgcattgataagcgtggaaaagtcaagggcacccaggagatgaaaaacaactacaatatcatggaaattcgcaccgtggctgtgggaatcgtcgcaatcaaaggagtggagtcagagttctacctcgcgatgaacaaggagggtaagctgtacgccaagaaggaatgcaatgaggactgtaacttcaaggagttgatcttggaaaatcactacaacacttatgcaagcgccaagtggactcataatggtggagagatgtttgtggcacttaaccagaaggggatccctgtgcggggaaagaaaactaagaaagaacaaaagactgctcacttcctgccaatggctattact

SEQ ID NO: 32704 - DNA, 582 bp, synthetic construct
  misc_feature 1..582: note = Description of Artificial Sequence: Synthetic coding sequence
  source 1..582: mol_type = other DNA
atgcacaagtggatattgacttggattcttccaacacttctgtacagatcctgctttcacattatttgcctcgttggcaccatttctcttgcctgcaatgatatgacacccgagcagatggccactaacgtgaattgttcatctccagaacgacataccagatcttacgactacatggaaggaggcgacatccgtgttcgacgcttgttttgtcgtacacaatggtaccttagaatagataagcgtggcaaggtcaagggcacacaggaaatgaagaacaattacaatatcatggagatccgaaccgtggcggtcggaattgtggccatcaaaggagttgaaagcgaattttaccttgccatgaacaaagaggggaagctgtacgccaagaaggagtgtaatgaagactgcaacttcaaagaactcattctggaaaaccactataatacatacgcctctgcgaagtggactcataacggtggcgagatgtttgttgcattaaatcagaaaggcattccagtgaggggcaaaaaaaccaagaaggaacagaaaacagcgcactttctgcccatggctattacg

SEQ ID NO: 32705 - DNA, 582 bp, synthetic construct
  misc_feature 1..582: note = Description of Artificial Sequence: Synthetic coding sequence
  source 1..582: mol_type = other DNA
atgcacaagtggatcctgacctggatccttccaaccctgctctacagatcgtgctttcatatcatctgcctggtcggaactatttccctggcctgcaacgacatgacgccagaacagatggcaactaatgtcaactgctcgtcgccggaacgtcacacccggtcatacgattacatggaaggaggtgatatccgcgtccggcgcctgttttgcagaactcagtggtacctccggatcgataagcggggaaaggtgaaaggcacgcaggaaatgaagaacaactacaacatcatggaaatccggactgtggcggtgggtatcgtggccatcaagggagtggagtccgaattctacctggcaatgaacaaggaaggcaagctgtacgccaagaaggaatgcaacgaagattgtaacttcaaggagctgatccttgagaaccactacaacacctacgcgtccgcaaaatggacccacaacgggggtgagatgttcgtcgccctgaatcagaagggaattccggtgcggggcaagaaaaccaagaaggaacaaaagactgctcacttcctcccgatggccatcacg

SEQ ID NO: 32706 - DNA, 582 bp, synthetic construct
  misc_feature 1..582: note = Description of Artificial Sequence: Synthetic coding sequence
  source 1..582: mol_type = other DNA
atgcataaatggattttaacatggattcttcccacactcctgtatcggagttgcttccacattatctgcctcgtgggtacgataagccttgcatgcaacgacatgacacccgaacagatggctacaaacgtgaactgctccagtcccgagcgccatacacgtagctacgattatatggaaggaggcgatatacgcgttaggagattgttttgtagaacacagtggtacttacgcatcgacaagaggggaaaggtaaaaggaacacaggagatgaaaaacaattataacatcatggagattcggaccgtggcagtcggtatagtggctataaagggcgtggagtccgagttttatttggcaatgaataaagagggcaaattgtacgccaagaaggaatgcaacgaagactgtaattttaaggagctaattctcgagaatcattataatacatacgctagcgcaaagtggacacataacggaggagaaatgttcgtggcactaaaccagaaagggattcctgtccgcggcaaaaaaactaaaaaagaacagaagaccgcacattttctccccatggcaattact

SEQ ID NO: 32707 - DNA, 582 bp, synthetic construct
  misc_feature 1..582: note = Description of Artificial Sequence: Synthetic coding sequence
  source 1..582: mol_type = other DNA
atgcacaagtggatcctgacatggatacttccgactctgctgtaccggagctgcttccacattatctgcctggttgggaccatctccttggcctgcaatgatatgacacctgaacaaatggccacgaatgttaactgcagttccccagagcgccatactcgcagttatgactacatggagggtggagatatccgggtgagaagactattttgccgcacccaatggtatctgcgcatcgacaagcgtggcaaggtgaaaggcactcaagaaatgaagaacaattacaacatcatggagattcgtactgttgccgtgggtatcgttgcgattaaaggcgtcgaatccgagttttatcttgcaatgaataaggaaggtaagctctatgccaagaaggagtgcaatgaagactgcaatttcaaagagctaatcctcgaaaaccattacaatacctacgctagcgccaaatggactcataatgggggggagatgttcgtagccctcaaccagaaaggtatccctgtaagaggaaagaaaaccaaaaaggaacagaaaactgcacactttctccccatggccatcacc

SEQ ID NO: 32708 - DNA, 582 bp, synthetic construct
  misc_feature 1..582: note = Description of Artificial Sequence: Synthetic coding sequence
  source 1..582: mol_type = other DNA
atgcataagtggatacttacatggattctgcccacactcctgtaccgaagctgcttccatataatttgtctggttggaaccatttcactcgcctgcaatgacatgacacctgaacagatggctacaaatgtgaattgcagcagcccggaaaggcatacccgttcttacgactacatggaaggcggagacattagggtgcgtcggcttttctgccgaacgcaatggtacctccggatcgacaaaagagggaaagtaaaaggaacacaggaaatgaaaaacaactacaatattatggaaatccgcacagttgccgtcggcatagttgcgataaagggcgtggagagcgaattctacttggctatgaacaaagaggggaaactgtacgctaagaaagagtgtaacgaggattgcaattttaaggagttgatcctcgagaatcactacaacacatatgccagcgcaaagtggacacacaacggcggcgagatgtttgtcgctcttaaccaaaagggcattccggtccgcgggaaaaagaccaagaaggaacagaagaccgcccattttctccctatggccataacc

SEQ ID NO: 32709 - DNA, 582 bp, synthetic construct
  misc_feature 1..582: note = Description of Artificial Sequence: Synthetic coding sequence
  source 1..582: mol_type = other DNA
atgcacaagtggatattaacgtggattttgccaacactgttatatcgttcctgttttcacataatttgcctcgtaggtacaatttctctagcctgcaatgacatgaccccagagcagatggctacaaatgtgaattgctcatctccagaaagacatacccgtagctatgactacatggagggcggcgatatacgcgtaaggcggctgttttgtcgcacacagtggtacctcagaatcgacaagaggggaaaggtgaagggaacacaggaaatgaaaaataactacaacataatggaaattcgcaccgtcgctgttggtatcgtggctataaaaggagtggaaagcgagttttacctcgcaatgaataaagaggggaagctgtatgctaaaaaggagtgcaacgaggattgcaacttcaaggaactgattctggagaaccattataacacgtatgcgagcgcgaaatggacacacaatggcggagagatgttcgtagccttgaaccagaagggcatcccagtgcgcggtaaaaaaacgaagaaagagcagaaaacagcgcacttcctgccaatggctattaca

SEQ ID NO: 32710 - DNA, 582 bp, synthetic construct
  misc_feature 1..582: note = Description of Artificial Sequence: Synthetic coding sequence
  source 1..582: mol_type = other DNA
atgcacaaatggatcctgacatggattctgccaacccttttgtatcgcagttgtttccatattatctgtttggtgggaactatcagtctggcctgtaacgacatgacacctgagcagatggccacaaacgtgaactgttcctcgccagaacgtcacacacgttcctacgactacatggagggcggtgatattcgcgtgaggcgcctgttttgcagaactcagtggtaccttcggatcgacaaacgcggaaaggtgaaggggacccaggagatgaagaataactacaacattatggaaattcgcactgtcgccgtcgggattgtcgcaatcaaaggagtggagtccgaattttaccttgcgatgaacaaagaaggcaaattatatgcaaaaaaagagtgtaatgaagactgcaactttaaagagcttattctggaaaaccactacaacacctacgcatctgcaaaatggacccacaatggcggcgagatgtttgtggcactcaatcagaaaggaatacccgtgagaggcaaaaaaactaaaaaggagcaaaagacagcacacttcctgccaatggccattacc

SEQ ID NO: 32711 - DNA, 582 bp, synthetic construct
  misc_feature 1..582: note = Description of Artificial Sequence: Synthetic coding sequence
  source 1..582: mol_type = other DNA
atgcataaatggatactcacatggatcttacccaccctcctgtataggtcctgctttcatatcatatgtctggttggcaccatatcattggcctgcaatgatatgacgcccgagcagatggccactaacgttaactgcagttcaccggagcggcatacacgatcctacgactacatggagggtggcgacattcgcgtcaggcgactcttctgcagaacccagtggtatctgcgcatagacaagcggggaaaggttaagggaacccaggagatgaaaaataactataatattatggaaataagaaccgttgcagtcggcattgtagcaattaaaggcgtggaaagcgaattttacttagccatgaataaggaggggaaactgtacgccaaaaaggagtgcaacgaggattgtaactttaaagagctgattctagagaatcactacaatacatacgcaagtgcgaagtggacgcataacggcggcgagatgtttgtggcgttgaaccagaaaggtatcccagtgcggggtaaaaagactaaaaaggaacagaaaacagcacacttccttcctatggcaattact

SEQ ID NO: 32712 - DNA, 582 bp, synthetic construct
  misc_feature 1..582: note = Description of Artificial Sequence: Synthetic coding sequence
  source 1..582: mol_type = other DNA
atgcataagtggatcttgacttggatattgcccacactgttgtatagatcttgctttcacatcatttgtctggttgggactatttcactcgcttgtaatgatatgaccccggagcagatggcaactaatgtgaactgttcttcgccagagcgacacacgcggagctacgattacatggaaggtggagacattcgtgtgaggcgcctgttctgtcggacccaatggtatcttagaattgacaaacgcgggaaggtgaagggaacgcaggaaatgaagaataactacaacatcatggaaatccggacggttgccgtgggcatcgtagccattaagggagtcgagtcagaattttacctggccatgaacaaggaaggcaaactctatgctaaaaaggaatgtaacgaggactgtaactttaaagagctcatcctggagaaccattacaatacctatgccagcgctaagtggacccacaacgggggggagatgttcgtggcccttaatcagaaagggatcccagtgcgaggtaagaagaccaaaaaggaacagaagactgcccacttcctcccaatggcaatcacg

SEQ ID NO: 32713 - DNA, 582 bp, synthetic construct
  misc_feature 1..582: note = Description of Artificial Sequence: Synthetic coding sequence
  source 1..582: mol_type = other DNA
atgcacaagtggatcctcacctggatactgccgacactgctgtatcggtcgtgctttcatataatctgcctggtgggcacgatttcgttagcatgcaacgatatgaccccagagcagatggccaccaacgtaaactgctcaagcccggagaggcacactaggtcttacgattacatggagggcggtgacatccgggttcgacgcttgttctgccgtacccaatggtacctaagaatcgataaacgcggcaaggtgaagggtacccaagaaatgaagaacaattataatatcatggagattcgtacagtggctgtgggaatcgtggccattaagggggtggaatccgaattttacctggcgatgaacaaagaaggtaaattgtacgccaagaaagaatgcaacgaggactgcaatttcaaggagttgattctggagaatcactacaatacgtatgcaagtgcgaagtggactcacaacggaggcgaaatgttcgtggcacttaaccagaagggcatacctgtgcgagggaagaagacaaaaaaggagcagaagacagcgcatttcctgccgatggccataacg

SEQ ID NO: 32714 - DNA, 582 bp, synthetic construct
  misc_feature 1..582: note = Description of Artificial Sequence: Synthetic coding sequence
  source 1..582: mol_type = other DNA
atgcacaagtggatcctaacctggattttacccactctcttgtatagatcatgcttccatattatttgtctggtgggtaccatctcgctagcttgtaacgatatgacacccgagcaaatggctacgaacgtaaactgtagttctcccgaacgccacacacgctcctacgattatatggagggcggcgatattagggtgaggaggctcttctgccggactcagtggtatctgaggatcgacaaacgcggaaaggtaaagggaactcaggaaatgaaaaacaattacaatatcatggaaatccgaactgtggccgttggcattgtggccattaagggagtggagtccgagttctacctggctatgaacaaggaagggaaactgtatgccaagaaagagtgcaacgaagactgcaactttaaggagctcattcttgagaaccactataacacatacgcatcagccaaatggactcataatgggggcgaaatgttcgtagccctcaaccaaaaggggatccccgttagaggaaagaaaaccaaaaaggagcagaagacagctcacttcttgcccatggctattaca

SEQ ID NO: 32715 - DNA, 582 bp, synthetic construct
  misc_feature 1..582: note = Description of Artificial Sequence: Synthetic coding sequence
  source 1..582: mol_type = other DNA
atgcacaagtggatccttacctggatactgcctactcttctgtacaggtcgtgctttcacatcatttgccttgtcggaaccattagcctcgcgtgtaatgacatgaccccagagcagatggcaactaacgtcaactgtagctcccccgaaagacatactaggtcctatgattacatggaaggaggagacattcgagtcagacgacttttctgtcgaacccaatggtacctcagaatcgataaaagaggcaaggtgaagggaacgcaagagatgaagaacaattacaacataatggagattcgcaccgtggcagtggggatcgtggccataaagggtgtcgaatcggaattctacttggcaatgaacaaggaaggaaagctgtacgcaaaaaaggaatgtaatgaagattgtaactttaaggagcttattcttgaaaaccattacaatacgtacgcctccgccaaatggacccataacggaggtgagatgttcgtggcactcaaccaaaagggaattccagtgagaggtaagaaaactaagaaagaacaaaagactgcccactttcttcctatggccattacc

SEQ ID NO: 32716 - DNA, 582 bp, synthetic construct
  misc_feature 1..582: note = Description of Artificial Sequence: Synthetic coding sequence
  source 1..582: mol_type = other DNA
atgcataaatggatccttacttggatcttgcctaccctgctgtaccgatcgtgttttcatatcatctgcttggttggtaccatctccttggcatgtaacgatatgactccagaacaaatggccactaatgtgaattgcagctcacccgaacgccacactagatcctacgattacatggagggaggggatattagagtgcggcgtttgttttgcagaactcagtggtacctgcgaatcgataaacggggtaaggtgaagggaacccaagagatgaagaacaattacaacattatggaaattcggactgtcgcagtgggcattgtggccattaaaggggtcgaatcggaattctaccttgcaatgaacaaggagggcaaactgtacgccaagaaggaatgtaatgaagattgtaactttaaagaactcatactggaaaaccactacaatacctacgcatcggcgaaatggacgcacaatggtggagagatgttcgtggcgcttaatcaaaagggtattccagttcgaggaaagaaaactaagaaagaacaaaagaccgcacattttcttccaatggcaataacc

SEQ ID NO: 32717 - DNA, 582 bp, synthetic construct
  misc_feature 1..582: note = Description of Artificial Sequence: Synthetic coding sequence
  source 1..582: mol_type = other DNA
atgcacaaatggatcctcacctggattcttcccactctcctatataggtcgtgttttcatatcatctgcctggtcggtaccatcagtctggcttgtaatgatatgactccagaacagatggctacaaatgtgaactgttcgtctccagagcgccacacacggtcctacgattacatggagggcggtgatatcagagtcagacggcttttctgcagaacgcagtggtaccttaggatagacaagcgcggaaaagttaaaggcacacaagagatgaaaaacaattataatataatggagattcggactgtcgccgtaggcatcgtagcaatcaagggcgtggaatcagagttctacctggccatgaataaggagggtaaactctatgctaagaaagagtgcaacgaagactgcaactttaaggagctgatccttgagaaccattacaacacctatgcttctgccaagtggacacataatgggggggagatgtttgtcgccctcaaccagaaaggcatacctgtcaggggaaaaaagactaaaaaggagcagaagacagcacacttcctgccaatggcaatcact

SEQ ID NO: 32718 - DNA, 582 bp, synthetic construct
  misc_feature 1..582: note = Description of Artificial Sequence: Synthetic coding sequence
  source 1..582: mol_type = other DNA
atgcataagtggatactgacttggattcttcctaccctgttgtaccgatcgtgtttccatatcatctgccttgtcggtaccatctccctggcatgtaatgatatgactccagagcaaatggccaccaacgtgaactgttcgtctccagagagacataccagatcatacgattacatggaaggcggtgacattcgtgtcagaaggctgttttgcaggacccagtggtaccttagaatcgataagagggggaaggtgaagggcactcaagagatgaagaacaactacaatatcatggaaattagaactgtggcggtgggcatcgtcgcaattaagggcgtggaatcggagttttaccttgcaatgaataaggaaggaaagctctacgccaagaaggaatgcaacgaagattgcaactttaaagaactgattcttgaaaaccattacaatacgtacgcctcggccaaatggacccacaatgggggagaaatgtttgtggccctcaatcagaaaggcatccccgtccgggggaagaaaactaagaaggaacaaaaaacggcacactttcttccaatggcaatcact

SEQ ID NO: 32719 - DNA, 582 bp, synthetic construct
  misc_feature 1..582: note = Description of Artificial Sequence: Synthetic coding sequence
  source 1..582: mol_type = other DNA
atgcataagtggatcctcacttggatattgccgaccctgctttatcggtcgtgttttcatataatctgcctcgtcggtacgatcagccttgcttgtaacgatatgacccctgaacagatggcgacaaacgtaaactgctcctcacccgaaaggcacacacggtcatatgattatatggaaggtggggacatccgggtcaggagactcttctgcagaacacagtggtacctgaggatcgacaagaggggtaaggtgaaagggactcaggagatgaagaataactacaatatcatggagatcagaacagtcgctgttggaattgtcgcaattaaaggagtggagtctgagttttatctggctatgaataaagaaggcaagctgtacgccaagaaagaatgcaatgaggattgcaactttaaggagctgatcctagaaaaccattataatacttatgcttccgcaaagtggactcataatggtggagagatgttcgtggctcttaaccagaaggggattccagtcaggggcaagaagaccaagaaggagcaaaagacagcacactttctgcctatggcaattact

SEQ ID NO: 32720 - DNA, 582 bp, synthetic construct
  misc_feature 1..582: note = Description of Artificial Sequence: Synthetic coding sequence
  source 1..582: mol_type = other DNA
atgcataaatggatcctgacctggatactgcccaccttgttatacaggagctgctttcacatcatctgcctggtgggcacaatttcacttgcctgcaatgatatgacaccagaacagatggcaacaaacgtgaattgcagcagtcccgagcggcacacaagatcgtacgactatatggaaggtggagacattagagtacgtcgcctgttctgtaggactcaatggtatctaaggatcgataagcgcggtaaagtaaagggcactcaggaaatgaagaacaattataacatcatggagatccggaccgtcgctgtcggcatcgtggcaattaaaggtgttgagagcgaattctacctggcaatgaacaaggaagggaaactctatgcaaagaaggagtgcaacgaggactgcaacttcaaagagctaatcctcgaaaaccactataacacctacgcgagcgccaagtggacccacaacggaggagaaatgttcgtcgctctgaatcagaagggcattcccgttagaggcaagaaaaccaaaaaggagcagaaaactgcacattttctgccaatggctatcaca

SEQ ID NO: 32721 - DNA, 582 bp, synthetic construct
  misc_feature 1..582: note = Description of Artificial Sequence: Synthetic coding sequence
  source 1..582: mol_type = other DNA
atgcacaaatggatcctgacctggattctgcctaccctgctctatagatcgtgctttcatatcatctgtctggtggggaccattagcctcgcctgcaacgacatgacccctgagcagatggccaccaacgttaactgctcgagccccgaacgccacactcgcagctacgactacatggagggaggagatatccgggtgagacggctcttctgccggacccagtggtacctcagaatcgacaagagaggaaaggtcaagggaactcaggagatgaagaacaactacaatatcatggagatccgcaccgtggccgtcggaatcgtggccatcaagggagtagaatccgagttctacctcgccatgaacaaggagggtaagctgtacgccaaaaaggaatgcaatgaagattgtaatttcaaggaattgattcttgaaaatcactacaacacctatgcatcggctaagtggactcacaacggcggagaaatgtttgtggcgctcaaccaaaagggaatcccggtgagaggtaagaaaactaagaaagaacaaaaaaccgctcatttcctgccaatggctatcacc

SEQ ID NO: 32722 - DNA, 582 bp, synthetic construct
  misc_feature 1..582: note = Description of Artificial Sequence: Synthetic coding sequence
  source 1..582: mol_type = other DNA
atgcacaagtggatcctgacctggattctgcccaccctcctctacaggtcttgtttccatattatctgccttgttgggaccatctccctggcctgtaatgatatgaccccagaacaaatggctaccaacgttaactgcagttcccctgagaggcatacccggtcctacgactatatggagggaggtgatatcagggtccgccgcctcttctgcaggacccaatggtatctgagaatagataagagaggcaaggtgaaaggaacgcaggagatgaagaataattataatattatggaaattagaacagttgcagtcgggatcgtggctattaaaggcgttgaaagtgagttttaccttgcgatgaacaaggagggaaagctgtacgccaaaaaagagtgtaatgaagattgtaacttcaaagaactgattttggagaatcactataatacttatgcctccgcaaagtggacccacaatggaggggagatgttcgtggcccttaaccagaagggcatacccgtgagaggcaagaagacaaaaaaagagcagaagactgcccatttcctccccatggccatcact

SEQ ID NO: 32723 - DNA, 582 bp, synthetic construct
  misc_feature 1..582: note = Description of Artificial Sequence: Synthetic coding sequence
  source 1..582: mol_type = other DNA
atgcataagtggattttaacttggattttaccaacacttttatatagatcatgttttcatataatatgtttggtaggaacaatttcattagcatgtaatgatatgacgccagaacaaatggctacaaatgttaattgtagttcaccagaaagacacacaagatcatatgattatatggaaggtggagatattagggttcgtagattgttttgtagaacacaatggtatttaagaattgataaaagaggaaaagttaaaggaacacaagaaatgaaaaacaattataatattatggaaattaggacagtggcagtaggaatcgttgctattaagggagttgaatcagaattttatcttgctatgaataaggaaggaaaactttacgcaaaaaaggaatgtaatgaagactgtaattttaaagaattaattttagaaaatcattataatacttatgctagtgcaaaatggacacacaatggaggagaaatgtttgttgctcttaatcaaaaaggaattccagttagaggtaaaaagacaaagaaagaacaaaaaactgcacatttccttcctatggctataaca

SEQ ID NO: 32724 - DNA, 582 bp, synthetic construct
  misc_feature 1..582: note = Description of Artificial Sequence: Synthetic coding sequence
  source 1..582: mol_type = other DNA
atgcacaaatggattctcacgtggattctgcccactcttctgtatcgctcgtgtttccatatcatctgcttggttggaacgatcagtctcgcctgtaatgatatgaccccggaacagatggctactaatgttaattgttccagccccgagagacacactcgcagttatgactatatggagggtggtgacatacgagtgcggagactgttttgtaggactcagtggtaccttaggattgataaacgcgggaaggtaaagggtacccaggaaatgaagaacaattacaacatcatggagatcaggaccgtcgcagtcggcattgtcgcaattaagggggttgagtctgagttctatctggccatgaataaggaaggcaagctctatgccaagaaggagtgcaatgaagattgcaattttaaagaactaattttagagaatcattataatacctacgcctcagcaaagtggacacataacggcggagaaatgtttgtcgccctcaatcagaaagggatccccgtgcgcgggaagaaaaccaagaaagaacagaagacagctcactttttacccatggccatcaca

SEQ ID NO: 32725 - DNA, 582 bp, synthetic construct
  misc_feature 1..582: note = Description of Artificial Sequence: Synthetic coding sequence
  source 1..582: mol_type = other DNA
atgcacaaatggatcctgacctggatcttgccaactctgctgtaccggagctgctttcacatcatctgtttagtgggcaccatcagtctcgcttgtaacgatatgacgccagaacagatggcgaccaatgttaattgtagcagcccagaacgccatacccgcagctatgactacatggagggtggcgacattagagttcgccggcttttttgtcgtacacagtggtatctgagaattgacaaacgaggtaaagtgaaaggtacccaagagatgaagaataattataacatcatggaaattcgcacggtcgctgtggggatcgttgcaattaagggcgtggagagtgagttttacctagcgatgaataaggagggtaaactatacgcaaagaaagaatgcaatgaagattgcaactttaaggagctgatcctggagaaccactacaatacttacgcctccgctaagtggacgcataatggtggcgaaatgttcgtcgccctgaaccaaaagggtatccctgtgcgtggtaagaagaccaagaaggaacagaagaccgctcatttcttgccaatggccattacg

SEQ ID NO: 32726 - DNA, 582 bp, synthetic construct
  misc_feature 1..582: note = Description of Artificial Sequence: Synthetic coding sequence
  source 1..582: mol_type = other DNA
atgcataaatggatcttgacctggattctgcctaccctgctgtacaggtcctgttttcatatcatatgcctcgtcggcactatttcactggcatgcaacgacatgacccccgaacaaatggccactaatgttaactgttccagtccagaaagacatacgcgctcgtacgattacatggagggtggagacatcagagtgcgtagactcttttgtaggactcaatggtatctgcgtatcgataagcggggaaaagtcaaggggactcaagagatgaagaataactacaacattatggaaattcggactgtggctgtcgggatcgtggccataaaaggcgttgaaagcgaattctacttggccatgaacaaggaaggcaaactttacgcaaagaaggaatgtaacgaagattgcaacttcaaggaactgattcttgagaatcattacaacacctacgcgtcggcaaagtggacccacaatgggggagagatgtttgtagcactcaaccagaagggtataccagtcagagggaagaaaactaagaaggagcagaaaacggcacacttccttcctatggctatcacc

SEQ ID NO: 32727 - DNA, 582 bp, synthetic construct
  misc_feature 1..582: note = Description of Artificial Sequence: Synthetic coding sequence
  source 1..582: mol_type = other DNA
atgcacaagtggatcttgacttggatcttacccaccctcttatatcgatcatgtttccatatcatttgtttggtaggtaccatctctttagcctgcaacgatatgactccggaacaaatggcaactaatgttaattgtagttctccagaacgccatactcgatcatacgactatatggaaggaggagacattcgtgtccgtcgattgttctgcaggactcaatggtacctcagaattgataaacgtggcaaagtcaaaggaacccaagaaatgaaaaataattacaatattatggaaatccgtaccgttgccgtcggtatagtggcaatcaagggcgtcgagtcggagttctacttggcaatgaacaaagagggaaaactttacgctaagaaggaatgtaacgaggattgcaattttaaagagttgattctcgagaatcattataacacatacgccagtgctaagtggacacacaatggaggggagatgttcgtagctcttaatcaaaaagggatccctgtgagaggtaagaagaccaaaaaggagcagaaaacagctcacttcctgccaatggctataacg

SEQ ID NO: 32728 - DNA, 582 bp, synthetic construct
  misc_feature 1..582: note = Description of Artificial Sequence: Synthetic coding sequence
  source 1..582: mol_type = other DNA
atgcacaagtggatcctcacttggatcctgccgactctcctgtaccgctcttgcttccatatcatttgcctcgtgggcactatctcactggcttgcaatgacatgactccagaacagatggcaaccaacgtgaattgttcctcgccagagcggcacacgcgaagctacgactacatggaaggcggagacatccgggtgagacgcctgttctgcaggacccaatggtacttgcgcatcgataaaagaggaaaagtgaaaggcacgcaggagatgaagaacaactacaatatcatggagattcggactgtcgcagtgggtatcgtggccatcaagggtgtggagtcagagttctacctggcaatgaataaggaaggaaaactgtacgccaagaaggagtgcaatgaggattgtaacttcaaagaactgatcttggagaaccactataacacttacgcgtcagcaaagtggactcacaatgggggtgagatgttcgtggccctcaaccagaagggcatcccggtgcggggaaagaaaactaagaaggagcaaaaaaccgcacactttctgcctatggctattacc

SEQ ID NO: 32729 - DNA, 582 bp, synthetic construct
  misc_feature 1..582: note = Description of Artificial Sequence: Synthetic coding sequence
  source 1..582: mol_type = other DNA
atgcataagtggatacttacttggatccttccgaccctgctttaccgtagctgtttccacataatctgtcttgtcggtaccatcagcctcgcttgtaacgatatgacccctgaacagatggcaactaacgtaaactgctcgagcccagaacgacataccagatcgtatgactacatggaaggtggcgatattcgggtgcggaggttgttttgcagaacgcagtggtacctcagaattgataagcgaggaaaggtgaagggaactcaagaaatgaaaaacaactacaacattatggaaatcagaaccgtggcggtgggaatcgtggctattaagggcgtggagtctgagttctacctggctatgaataaggaggggaaactctacgccaagaaagagtgtaatgaggactgtaactttaaggagctgattctggaaaaccattacaatacgtacgccagcgcgaaatggacccacaatggtggagaaatgtttgtcgccctgaaccaaaagggtatacctgtcagaggaaaaaagactaagaaagagcaaaaaactgcacattttctccccatggcaattacg

SEQ ID NO: 32730 - DNA, 582 bp, synthetic construct
  misc_feature 1..582: note = Description of Artificial Sequence: Synthetic coding sequence
  source 1..582: mol_type = other DNA
atgcacaagtggatcctgacttggattctcccaaccttgttgtacaggtcttgtttccacatcatctgcttggtaggcaccatcagccttgcctgcaatgacatgaccccggagcagatggcgacgaacgtgaattgctccagcccggaacgccacacccggtcctacgactacatggagggcggagatatccgcgtgaggcgcctcttctgtagaacccagtggtacctgagaattgataagcgcggaaaggtcaaaggaacgcaagagatgaagaacaactacaacatcatggaaattcgcaccgtggccgttggtatagtcgctatcaagggagtggaatcagagttctatctggcgatgaacaaagagggaaaactgtatgccaaaaaagaatgcaacgaggactgcaactttaaggagctgatcttggagaaccattacaatacttacgcatccgcgaagtggactcacaacggcggtgaaatgttcgtggcactgaatcaaaagggtatccccgtgcggggaaagaaaacgaaaaaggaacagaaaactgcgcatttcctcccgatggctatcact

SEQ ID NO: 32731 - DNA, 582 bp, synthetic construct
  misc_feature 1..582: note = Description of Artificial Sequence: Synthetic coding sequence
  source 1..582: mol_type = other DNA
atgcacaagtggatcctcacttggattctcccaacactcctttaccgtagctgtttccatatcatttgcctcgtgggcaccatttccctcgcttgcaacgacatgacccccgagcagatggccacgaacgtgaactgctcgtcgcctgagcggcacacccgaagctacgactacatggagggaggcgatatccgtgtccgccgcctcttctgccggacgcaatggtacttgcgcattgacaaacgtggaaaggtcaagggcactcaggaaatgaagaataactacaacatcatggaaatccgcactgtggctgtcggcatcgtggcaataaagggcgtcgaatcggagttctacctcgcgatgaacaaagaaggtaagctgtacgctaagaaagagtgcaatgaggattgcaacttcaaggagttgattctggagaaccattataacacttatgcctctgccaagtggacgcacaatggcggcgaaatgttcgtggcccttaatcaaaagggtattcctgtcaggggcaagaagaccaaaaaggagcagaagacggcccacttccttcccatggctatcact

SEQ ID NO: 32732 - DNA, 582 bp, synthetic construct
  misc_feature 1..582: note = Description of Artificial Sequence: Synthetic coding sequence
  source 1..582: mol_type = other DNA
atgcataagtggatcctaacctggatcctcccaacgttattgtatcggtcgtgctttcacatcatctgtttggtgggcaccatatcccttgcatgtaatgacatgacaccagagcagatggcgacaaacgtgaactgttcctctccagaacggcataccaggtcatacgattatatggagggaggagatatcagggtgcggcgtctgttctgtcggacacagtggtacctgaggattgataagcggggcaaggtgaagggcactcaggagatgaagaataactacaacattatggagataaggactgtggccgtgggaattgtggcgatcaagggtgtcgagtcggaattctatctggccatgaacaaggagggtaaactctatgccaagaaggagtgcaatgaggactgcaatttcaaggagttaatactggagaaccactataatacctatgcgagcgctaagtggacgcacaacggaggcgagatgtttgtcgccctgaatcagaaagggatccctgtgaggggaaagaagactaaaaaggaacaaaagaccgctcacttccttccaatggccatcacc

SEQ ID NO: 32733 - DNA, 582 bp, synthetic construct
  misc_feature 1..582: note = Description of Artificial Sequence: Synthetic coding sequence
  source 1..582: mol_type = other DNA
atgcataaatggatactgacctggattcttccaactttgctctacaggtcgtgtttccacataatctgcctggtgggtactatcagtctcgcctgcaacgatatgacccccgaacaaatggccacgaacgtgaactgttcgtcccctgaaagacacacccggtcctacgactacatggagggaggagatattagagttaggcggctgttttgcaggactcagtggtacctgcgcattgataaacgaggtaaggtgaagggcactcaggagatgaagaacaattacaacatcatggaaatcaggacggtcgccgtgggaattgtggcaattaagggagtcgaatctgagttttatcttgctatgaacaaggagggcaaattgtacgcgaaaaaggaatgtaacgaggactgtaacttcaaggaactgatcctggaaaatcattacaacacctacgcatcagcaaagtggacccataatggcggtgaaatgtttgtagcacttaatcaaaagggaatcccagtccgcggcaagaaaaccaagaaagaacaaaagaccgcgcactttctcccgatggcgattacg

SEQ ID NO: 32734 - DNA, 582 bp, synthetic construct
  misc_feature 1..582: note = Description of Artificial Sequence: Synthetic coding sequence
  source 1..582: mol_type = other DNA
atgcataagtggatcctcacctggattttgcccacactcctttaccgtagctgcttccatattatttgtctagtagggaccatctcccttgcgtgtaacgacatgacccctgagcagatggctactaatgttaactgttcttctcccgaacgccatacaaggagctacgactacatggagggaggtgatattagggtccggagattattctgtagaacacagtggtacctgcggattgataaaagaggaaaagtgaaggggacccaagaaatgaaaaataattataatatcatggagatccggactgtcgccgttgggatcgtcgcgattaagggggttgagagtgagttctatctcgccatgaataaggaagggaaactgtacgctaagaaggagtgtaacgaggactgcaattttaaggagctgatattggagaatcactacaatacctatgcctccgccaagtggactcataatggtggggagatgttcgtagctctcaatcagaaggggatccctgtgcgaggcaaaaagactaagaaggagcagaagacagcacattttctcccaatggctataact

SEQ ID NO: 32735 - DNA, 582 bp, synthetic construct
  misc_feature 1..582: note = Description of Artificial Sequence: Synthetic coding sequence
  source 1..582: mol_type = other DNA
atgcataagtggatcctcacctggatcctgccgaccttgctgtaccgctcatgctttcacatcatttgtctcgtcgggaccatcagcttggcttgcaatgatatgactcctgaacagatggcgaccaacgtgaattgctcttcccctgaacggcatactcgctcatacgattacatggaaggaggagatattagagtccgccgcctgttctgtcggacccagtggtacctgagaatcgacaaacggggcaaggtgaagggaacgcaggagatgaagaacaactacaatatcatggagatcagaactgtggcggtggggattgtggccattaagggggtcgagtccgaattctacctcgctatgaataaagagggaaaactgtacgccaaaaaagaatgcaacgaggattgcaacttcaaggagctgatcttggaaaaccattacaatacctacgcttccgcaaagtggacgcataacggaggggaaatgtttgttgcattgaaccaaaagggcatcccggtgcgcgggaaaaagactaagaaagagcaaaagaccgcccactttcttccaatggccatcact

SEQ ID NO: 32736 - DNA, 582 bp, synthetic construct
  misc_feature 1..582: note = Description of Artificial Sequence: Synthetic coding sequence
  source 1..582: mol_type = other DNA
atgcacaagtggattctgacgtggatcctgccaaccctgctgtatcgatcatgctttcacatcatatgcttggtggggaccatctcgttggcctgcaatgacatgaccccagagcaaatggccaccaatgtcaactgttcctcaccagagcgccatactcggtcctacgactacatggaaggaggagatatccgcgtgcggcgcctcttttgcagaactcagtggtacctcagaattgacaagagagggaaggtgaagggcacgcaggaaatgaagaacaactacaacatcatggaaatccggaccgtggccgtcggaatcgtggcaatcaagggtgtggaaagcgagttttacctggcgatgaataaagagggaaaattgtatgccaaaaaggagtgtaatgaggattgtaatttcaaggaactgatcctggaaaatcactacaacacctacgccagcgcgaaatggacccacaatggtggagagatgtttgtggccctgaaccagaaggggatccctgtccggggaaaaaagactaagaaggaacagaaaaccgcccatttcctgccgatggctatcact

SEQ ID NO: 32737 - DNA, 582 bp, synthetic construct
  misc_feature 1..582: note = Description of Artificial Sequence: Synthetic coding sequence
  source 1..582: mol_type = other DNA
atgcacaaatggatactgacctggatacttcctaccctgctctataggagctgttttcatatcatctgtctggtcggcactatctctctcgcttgcaatgacatgacacctgaacaaatggccaccaacgttaactgcagtagtccggagaggcatacaagatcttacgactatatggaaggcggagatattcgagtgaggagactgttctgtaggacccaatggtacctgcgcattgacaaacgcggtaaagtgaaaggcacacaagaaatgaagaataactataacatcatggaaatcagaaccgtggcagttggaatcgtggccatcaagggagtggagagtgagttttatcttgccatgaacaaagagggaaaactttacgctaagaaggaatgtaacgaagactgtaactttaaggaactgatactggagaatcattataatacatacgcatccgctaaatggacacacaacggcggcgaaatgtttgtcgcactcaatcagaaagggatccccgtgcgcggaaagaaaacaaaaaaggagcagaaaacagcccatttcctgcccatggctatcact

SEQ ID NO: 32738 - DNA, 582 bp, synthetic construct
  misc_feature 1..582: note = Description of Artificial Sequence: Synthetic coding sequence
  source 1..582: mol_type = other DNA
atgcataaatggatcctcacatggattctgccgacactgctgtatcgttcttgcttccacataatttgcctcgtggggaccatatccctggcatgtaacgacatgaccccagagcaaatggcaaccaatgtgaattgctcatcccccgagagacacacccgctcctacgattatatggagggcggagatattcgcgttcggcggttgttctgcagaacccagtggtacttaaggatagacaaacggggaaaagttaaaggaacccaggagatgaagaataactacaacattatggagataagaacagtagcagtggggattgtggccatcaaaggcgtggagagcgaattctacctcgccatgaacaaggaaggcaagctttacgccaagaaggagtgtaacgaggactgcaattttaaagagctcattctggagaaccattacaatacttacgcttctgccaagtggacacataacgggggagaaatgtttgtagcgctcaaccagaagggaatccccgtccgcggcaagaaaaccaagaaagagcagaagaccgcccacttccttcccatggccattacc

SEQ ID NO: 32739 - DNA, 582 bp, synthetic construct
  misc_feature 1..582: note = Description of Artificial Sequence: Synthetic coding sequence
  source 1..582: mol_type = other DNA
atgcacaagtggatcctaacttggattctacccaccctgctatacagaagttgtttccacatcatctgcctcgtgggcacaattagtctcgcctgtaatgatatgacaccagagcaaatggctaccaatgttaattgttcaagccctgagcgtcatacgcggtcatatgactacatggaaggtggcgacatccgggtgcggagactgttctgtcggacgcagtggtatctccggatcgacaaaagaggaaaagtgaaggggacacaggaaatgaaaaacaattataacattatggagataagaacagttgcagtgggcattgtcgccatcaaaggtgtggagtcagagttttatctcgcaatgaacaaggaggggaagctctatgccaagaaggagtgtaatgaggattgcaactttaaagaattgattctggagaatcactacaatacatacgccagcgccaaatggactcataacggtggcgaaatgtttgtcgctctgaatcaaaaaggaatccccgtgagagggaagaagacaaaaaaagagcagaagacggcgcatttcttacccatggctataact

SEQ ID NO: 32740 - DNA, 582 bp, synthetic construct
  misc_feature 1..582: note = Description of Artificial Sequence: Synthetic coding sequence
  source 1..582: mol_type = other DNA
atgcataaatggatcctgacttggatactgccgacgctgttgtatagatcctgtttccatattatctgcctggtcggtaccattagtttggcctgcaacgacatgacacctgagcagatggctacgaatgtgaactgctccagccctgagcgccacacccgctcctacgattacatggagggcggtgacattagagtgcgccgcttgttctgtaggacacagtggtacctcagaatagacaaaagaggcaaagtcaagggaacccaagaaatgaagaataactacaacataatggagattagaaccgttgctgtgggtattgtggcgatcaagggcgtggaaagtgagttttacctggcaatgaacaaggagggcaaactgtacgcaaaaaaagagtgtaatgaagattgcaacttcaaggagcttatactggaaaaccattacaacacttatgcaagtgctaagtggacgcacaatggtggtgaaatgtttgtggctctgaatcagaagggaattcccgtcaggggcaagaagacgaagaaggagcagaagaccgctcattttctccctatggccataacc

SEQ ID NO: 32741 - DNA, 582 bp, synthetic construct
  misc_feature 1..582: note = Description of Artificial Sequence: Synthetic coding sequence
  source 1..582: mol_type = other DNA
atgcataagtggattctcacttggatcctcccgactctcctgtatcgctcctgtttccacattatctgccttgtgggcactatctcccttgcctgtaacgacatgaccccagagcaaatggccaccaatgtcaattgctcgtcaccggaaaggcatacgcgctcctacgactacatggagggcggagatatccgcgttcggcgcctcttctgccgcactcaatggtacttgaggattgacaagaggggaaaagtgaagggaacccaggagatgaagaacaactacaatatcatggagatccggaccgtggcggtgggaatcgtcgccattaagggagtcgagtcagaattctaccttgctatgaacaaagaaggcaagttgtacgcgaagaaggaatgcaacgaagattgcaacttcaaagaactgatactggaaaaccactacaacacctacgcttcggcgaagtggacccacaatgggggcgagatgttcgtggctctcaatcagaagggaatcccagtgcgggggaagaaaaccaaaaaggagcaaaaaactgcacactttttgccgatggcaatcacc

SEQ ID NO: 32742 - DNA, 582 bp, synthetic construct; identical to SEQ ID NO: 32702
  misc_feature 1..582: note = Description of Artificial Sequence: Synthetic coding sequence
  source 1..582: mol_type = other DNA

SEQ ID NO: 32743 - DNA, 582 bp, synthetic construct
  misc_feature 1..582: note = Description of Artificial Sequence: Synthetic coding sequence
  source 1..582: mol_type = other DNA
atgcataaatggatattaacgtggatattaccgacgctattatatcgttcgtgttttcatataatatgtttagtaggtacgatatcgctagcgtgtaatgatatgacgccggaacaaatggcgacgaatgttaattgttcgtcgccggaacgtcatacgcgatcgtatgattatatggaaggtggtgatatacgtgttcgacgattattttgtcgtacgcaatggtatttacgtatagataaacgaggtaaagttaaaggtacgcaagaaatgaaaaataattataatataatggaaatacgaacggtagcggttggtatagtagcgataaaaggtgtagaatcggaattttatttagcgatgaataaagaaggtaaattatatgcgaaaaaagaatgtaatgaagattgtaattttaaagaactaatattagaaaatcattataatacgtatgcgtcggcgaaatggacgcataatggtggtgaaatgtttgttgcgttaaatcaaaaaggtataccggtacgtggtaaaaaaacgaaaaaagaacaaaaaacggcgcattttctaccgatggcgataacg

SEQ ID NO: 32744 - DNA, 582 bp, synthetic construct
  misc_feature 1..582: note = Description of Artificial Sequence: Synthetic coding sequence
  source 1..582: mol_type = other DNA
atgcacaaatggatcctaacctggatactccccaccctgctgtaccgttcttgctttcatattatttgtctggtgggcaccatatctctggcatgtaacgatatgacacctgaacagatggccactaacgtgaactgtagttcccccgaacggcacacccggtcttacgactacatggaaggcggtgatattcgggtcagaagactgttttgtcgcactcagtggtacctgcggattgataaaagaggaaaggtcaagggcacccaggaaatgaaaaacaactacaacataatggaaattcggaccgtcgcagtgggtatcgtggcaatcaaaggcgtggaatccgaattctatctggccatgaacaaagagggaaaactgtatgccaagaaggagtgcaacgaagattgcaacttcaaagaattaatcctcgagaatcattataacacttatgcctctgcaaaatggacccacaatggtggcgagatgttcgtcgctctgaatcagaaagggattccggttcggggaaagaaaactaaaaaggaacagaagactgcccatttcttacctatggctattacc

SEQ ID NO: 32745 - DNA, 582 bp, synthetic construct
  misc_feature 1..582: note = Description of Artificial Sequence: Synthetic coding sequence
  source 1..582: mol_type = other DNA
atgcataagtggattctcacttggattctgcctaccctgctgtatcggtcgtgttttcacatcatatgtctggtgggcacgataagcctcgcctgtaacgatatgactccagaacagatggcaactaacgtgaactgcagctctcccgagcgccacacgagatcctacgactacatggaaggcggggacattagggttaggagacttttctgccgaacccagtggtatctcagaattgacaaaagagggaaggtgaaaggcactcaggagatgaagaacaattacaacatcatggagattcgtactgtcgccgtgggaatcgtcgcgattaagggtgtagagtcagaattctacctggcaatgaataaggaaggaaagctgtatgcaaaaaaggaatgtaatgaggattgcaatttcaaggaactgattcttgaaaaccattacaacacttatgcatcggctaagtggacccataacggtggagaaatgtttgtggcattgaatcaaaaaggcatcccagtgcgtggcaagaaaactaagaaggaacaaaagaccgcacactttcttccaatggcaattacc

SEQ ID NO: 32746 - DNA, 582 bp, synthetic construct
  misc_feature 1..582: note = Description of Artificial Sequence: Synthetic coding sequence
  source 1..582: mol_type = other DNA
atgcataaatggattcttacctggatcttaccaacgctcctttatcgcagttgctttcacatcatctgcctagtgggaactattagcttggcttgtaacgatatgacccccgaacagatggctaccaacgtaaattgctcctcccctgagaggcacacccgatcctacgattatatggagggtggagatattcgggttaggcggctgttctgccgcacgcagtggtatcttcggattgacaagcgaggcaaagtgaaagggacacaggagatgaaaaataattataacatcatggagatccgaaccgtggcagtgggaattgttgcaataaagggggttgaatcggagttctacctagcgatgaataaggaggggaagttatacgcgaaaaaagagtgcaacgaggactgcaacttcaaagagctcatcctggagaatcactacaacacgtacgcctcagcaaaatggacgcacaatggaggagaaatgtttgtggccctcaaccagaagggcattcctgtgcggggcaaaaaaactaagaaggagcagaaaacagcccattttcttccaatggctatcaca

SEQ ID NO: 32747 - DNA, 582 bp, synthetic construct
  misc_feature 1..582: note = Description of Artificial Sequence: Synthetic coding sequence
  source 1..582: mol_type = other DNA
atgcacaagtggatcctgacatggatcttgcccaccctgctctataggagttgttttcacattatctgtttggtaggcacgatctccctggcctgtaatgatatgacaccagagcagatggccacaaatgtcaattgcagcagtccagagaggcacacaagatcttatgactatatggaagggggcgatataagggtgcgacggctgttctgccggacacagtggtatctgaggattgacaagcgcggcaaagtcaagggaacccaagagatgaaaaataattacaatattatggaaatcaggacagtagccgtggggatagtggcgattaagggtgtggaaagtgagttctacttggctatgaacaaggagggcaaactgtacgctaagaaagagtgcaatgaggactgcaatttcaaagaactgatcctggagaaccactacaacacttatgcgagtgcaaaatggacacacaacggtggagagatgtttgtagctctgaatcagaagggcatcccagtgcgggggaagaagactaagaaggagcagaaaactgcacactttctgcccatggccatcacc

SEQ ID NO: 32748 - DNA, 582 bp, synthetic construct
  misc_feature 1..582: note = Description of Artificial Sequence: Synthetic coding sequence
  source 1..582: mol_type = other DNA
atgcataaatggatcctgacttggatccttcccactctcctatatcggtcttgttttcatataatctgccttgtgggaacaatttctctcgcgtgtaatgatatgactcctgagcagatggctactaatgtcaattgctcctctcccgaacggcatacaaggtcgtacgactatatggaagggggggacatcagagtccggcgactgttctgtaggacacagtggtacctccgaatagataaacgggggaaggttaaaggaactcaggaaatgaaaaataattataacatcatggaaatacgaactgtggccgtgggaatcgtggctatcaaaggggttgaatctgaattctacctagccatgaataaagagggaaaattgtatgcaaaaaaagaatgcaacgaagattgcaatttcaaagagctaatcctagagaatcattataatacttatgcctcagcaaagtggacacataatggaggagaaatgttcgtcgcactgaatcagaaagggataccagtacgggggaaaaaaacaaaaaaagagcaaaaaacagcacactttctgcccatggcaataact

SEQ ID NO: 32749 - DNA, 582 bp, synthetic construct
  misc_feature 1..582: note = Description of Artificial Sequence: Synthetic coding sequence
  source 1..582: mol_type = other DNA
atgcataaatggatcctcacctggattctcccgaccctgctttacaggtcctgttttcacattatctgcctggtgggaactatctccctggcatgcaatgatatgaccccggagcaaatggcaacgaacgtcaattgttcatcgcctgagaggcataccagatcgtacgactacatggaagggggcgatattcgcgtcagacgcttgttttgtcgcactcagtggtacctgcgcattgacaagagaggaaaagtcaagggtacccaggaaatgaagaataactacaacatcatggaaattagaacggtcgcggtgggaatagtggccatcaagggcgtggagagcgaattctacctggcaatgaacaaggagggtaaactttacgcaaagaaagagtgtaatgaggattgcaactttaaggaactgattctggaaaaccattacaatacttacgcaagcgctaaatggacccacaatggaggtgaaatgtttgtcgctttgaaccaaaagggaataccagtccgcggtaagaaaactaagaaggaacaaaagactgcacactttctccctatggccattact

SEQ ID NO: 32750 - DNA, 582 bp, synthetic construct
  misc_feature 1..582: note = Description of Artificial Sequence: Synthetic coding sequence
  source 1..582: mol_type = other DNA
atgcacaagtggatcctgacttggattctcccaaccctgctctacaggagctgttttcatataatctgtcttgttggaacgattagcctggcgtgcaatgatatgacaccggaacaaatggctactaatgtcaactgctcttcccccgagcggcacaccagatcatacgattatatggaagggggagacatccgagtacggcgtctcttttgccggactcagtggtacctgagaattgacaagcgcggcaaggtgaaaggcactcaggagatgaaaaacaactacaacattatggagattcgcaccgttgccgtgggcattgttgcaattaaaggagtggagtccgagttctatctagccatgaataaagagggcaaactgtatgctaaaaaagaatgtaacgaagactgcaacttcaaagaacttattctagagaatcactacaatacgtacgcctccgccaaatggacccacaacggaggtgaaatgttcgttgctctgaatcagaaggggattccggtgcggggaaaaaagactaaaaaggaacagaaaacagctcacttcctgcccatggccatcact

SEQ ID NO: 32751 - DNA, 582 bp, synthetic construct
  misc_feature 1..582: note = Description of Artificial Sequence: Synthetic coding sequence
  source 1..582: mol_type = other DNA
atgcataaatggatccttacatggattctgcctacacttctgtacaggtcatgcttccatattatttgtttggtaggaactatttctctggcctgcaatgatatgaccccagagcaaatggctactaatgtgaattgctcgtcaccagagcggcataccagaagctacgattacatggaggggggggacattcgggtgcgccggctgttctgtagaacccagtggtacctgcggatcgacaagcggggcaaggtgaaaggcacacaagaaatgaaaaacaactataacatcatggaaatccgtacagtcgccgttggtattgtggcgatcaagggtgtcgagtcagagttctatctcgcaatgaataaggagggcaaattgtacgcaaaaaaggagtgtaatgaggattgtaattttaaggaactgatactcgagaatcattataacacctatgcctcagcgaaatggacccacaacggcggcgaaatgtttgttgccctgaaccagaaaggcattccggttcgcgggaagaagacaaaaaaggagcagaaaaccgcccatttcctccctatggcgattaca

SEQ ID NO: 32752 - DNA, 582 bp, synthetic construct
  misc_feature 1..582: note = Description of Artificial Sequence: Synthetic coding sequence
  source 1..582: mol_type = other DNA
atgcataaatggatactgacctggatcctcccaacccttctttacagatcatgttttcacatcatctgccttgttggaactatctccttggcctgtaatgatatgacgccggaacaaatggcaactaacgtgaactgttcatctccagagcgacatactagaagctacgactacatggaagggggtgatattcgggtgcgccgtttgttttgcagaacccaatggtaccttcgcattgataaaaggggaaaagtgaagggtacccaagagatgaagaataactacaacattatggagattaggaccgtggcagtcgggattgtggctatcaagggagtggaatcggagttctacctcgccatgaacaaagaaggtaagctgtacgcgaagaaggaatgtaatgaggactgtaactttaaggagctgattctcgaaaaccactataacacttatgcatccgcaaagtggacgcataatggcggcgaaatgtttgttgcgctgaaccagaagggaataccggtccgtggcaaaaagacgaagaaggaacagaaaacggcacacttccttcctatggcaattact

SEQ ID NO: 32753 - DNA, 582 bp, synthetic construct
  misc_feature 1..582: note = Description of Artificial Sequence: Synthetic coding sequence
  source 1..582: mol_type = other DNA
atgcacaaatggatcctgacctggatcctgcctactctgctctacagatcatgcttccacatcatttgcctcgtcggaactatctccctcgcctgtaatgacatgacccctgagcagatggctactaacgtcaattgctcgtcccccgaacgccataccagatcatacgattacatggaaggaggagatatccgggtgcgccggctcttctgccgaactcaatggtacctgcgcatcgataagagaggaaaggttaagggcactcaggaaatgaagaacaactacaacatcatggaaatccgcactgtggcagtgggtatcgtggcgattaagggcgtggagagcgaattctacctggccatgaacaaggagggaaagctgtacgcaaagaaggaatgcaacgaggactgcaatttcaaggaactgatcctggaaaatcactataacacctacgcaagcgccaaatggacgcataacggaggagagatgtttgtggccctgaaccagaaggggatcccggtgagaggcaagaaaactaagaaagagcagaaaactgcccatttcctgccgatggccatcacg

SEQ ID NO: 32754 - DNA, 582 bp, synthetic construct
  misc_feature 1..582: note = Description of Artificial Sequence: Synthetic coding sequence
  source 1..582: mol_type = other DNA
atgcataagtggatactgacttggatccttccaactcttctctatagatcgtgctttcatattatttgtctggttggcactatttctttggcctgtaacgacatgactccggagcagatggctaccaacgtaaactgcagcagcccagaaaggcacacacggtcttacgactacatggaggggggcgatattcgtgtccgcagattattttgcaggacacagtggtacctgagaattgataaacgcgggaaggtgaagggtactcaggagatgaagaataactacaacataatggaaattagaacggtggcggtcggcatcgtggcaattaaaggagtggaatccgagttttacctggctatgaacaaagagggaaagctttacgccaagaaggagtgtaacgaggattgcaactttaaggaactgatcctcgagaatcactacaatacctatgcatccgcaaaatggacacacaatggtggggagatgtttgtggcactcaaccagaagggtattcctgtgagggggaaaaaaacaaagaaggagcagaagacagctcattttcttcccatggctatcacc

SEQ ID NO: 32755 - DNA, 582 bp, synthetic construct
  misc_feature 1..582: note = Description of Artificial Sequence: Synthetic coding sequence
  source 1..582: mol_type = other DNA
atgcacaaatggattctgacctggatccttccaacgttgctctaccgctcttgttttcacattatctgtctcgtcggcacaatttctctggcatgcaacgacatgactcccgagcagatggctaccaatgtcaactgtagttctcctgagcgacatacccggtcttatgactatatggaaggcggagatataagggtgagaaggctgttttgtagaactcagtggtatctgagaatagataagcggggaaaagtgaaggggactcaggaaatgaaaaataattataacatcatggagatccggactgtcgcagtcgggattgttgcgatcaagggcgtggagagcgaattctatctggccatgaacaaagagggcaagctttacgccaaaaaagaatgtaatgaagattgcaactttaaagaactgattctggaaaatcactacaatacatacgcttccgctaaatggactcataatggtggtgagatgtttgtggcactgaatcagaaaggaatccccgtgagggggaaaaagaccaagaaagagcaaaaaacagctcactttctgcccatggctataacc

SEQ ID NO: 32756 - DNA, 582 bp, synthetic construct
  misc_feature 1..582: note = Description of Artificial Sequence: Synthetic coding sequence
  source 1..582: mol_type = other DNA
atgcataaatggattcttacttggattttgccgactctcctgtaccgttcatgtttccatatcatctgcctggtggggactatcagcctggcgtgcaatgacatgaccccagaacaaatggccaccaacgtgaattgctccagccccgagcgccacaccagatcgtatgactacatggaggggggagacatccgagtgcggcgcctgttctgtcgcacgcagtggtacctccggattgataagcggggaaaggtgaaaggaacccaggagatgaagaataactacaatatcatggaaatccgtactgtcgccgtcggcatcgtggctatcaagggtgtggaaagcgaattctatctggccatgaataaggagggaaagctctacgccaaaaaagagtgcaacgaagattgtaactttaaagagctgatcctcgagaatcactacaacacctacgcctccgcaaagtggacccataacggaggcgaaatgtttgtggcgttgaaccagaagggaatcccagtgaggggcaaaaagactaagaaggaacaaaaaaccgctcacttcctgccgatggctatcact

SEQ ID NO: 32757 - DNA, 582 bp, synthetic construct
  misc_feature 1..582: note = Description of Artificial Sequence: Synthetic coding sequence
  source 1..582: mol_type = other DNA
atgcacaagtggatactcacttggattcttcctacacttctgtatcgctcttgtttccatatcatctgccttgttgggactatctcgcttgcttgcaatgatatgacaccagagcagatggctactaatgtaaattgcagttctccagaaagacacacacgctcatatgattacatggaaggaggagatatccgagttaggagactcttttgcagaactcaatggtatctccgtatagataaacggggaaaagtaaaagggacacaagaaatgaaaaataactataatataatggaaattcgtactgtggctgtaggaatagttgccatcaaaggggttgaatctgagttctatcttgccatgaataaagaagggaaactctatgccaaaaaggaatgcaatgaagattgtaacttcaaagaactgatactggaaaatcactataacacttacgcttctgctaaatggactcataacgggggggaaatgttcgttgcactaaaccagaaaggaatacccgtgcgggggaaaaaaactaaaaaagaacagaaaactgctcacttcctgcctatggccattaca

SEQ ID NO: 32758 - DNA, 582 bp, synthetic construct
  misc_feature 1..582: note = Description of Artificial Sequence: Synthetic coding sequence
  source 1..582: mol_type = other DNA
atgcataagtggattcttacatggattctcccaacccttctgtacaggtcatgttttcacatcatttgtctggtcggcaccatttccttggcctgcaatgatatgactccagagcaaatggccacaaacgtaaattgcagtagtcctgagaggcacacaagatcctatgactacatggagggtggtgatattagagtgaggagactattttgcaggacccagtggtatctgagaatcgataagcgggggaaagtgaagggcacccaggagatgaagaacaattacaacatcatggagattagaactgtagccgtgggcatagtggcaattaagggtgtcgaaagcgagttttatcttgctatgaataaagaaggtaagctctacgctaagaaagaatgcaatgaggactgcaattttaaagagctgatactagaaaaccattacaatacttatgcaagtgcaaagtggacccacaacggcggcgagatgttcgtagccctgaaccagaaagggatcccagtacggggcaagaagactaaaaaagaacagaagacggcccattttcttcctatggccatcacc

SEQ ID NO: 32759 - DNA, 582 bp, synthetic construct
  misc_feature 1..582: note = Description of Artificial Sequence: Synthetic coding sequence
  source 1..582: mol_type = other DNA
atgcataagtggattctgacctggattctgcctactcttctttaccggtcatgttttcatatcatctgtcttgtgggaactatcagcttggcgtgtaacgatatgactccggaacaaatggccaccaacgtcaactgttcttcgccagagcggcatactcggagctacgactacatggagggcggtgatatccgcgtgagacgactgttctgccgtacccagtggtaccttcggatcgataagcggggtaaagtgaaggggacccaagaaatgaagaacaattacaacataatggagatcagaacggtggccgtcgggatcgtggccatcaagggagtggaatcggagttctacctggcaatgaataaagaagggaaactttacgcaaagaaggagtgtaatgaagattgcaactttaaggaactcatccttgaaaatcactacaatacttacgcctccgctaagtggacccataatggtggtgaaatgtttgtcgcactgaaccagaaaggtattcccgtgagaggcaaaaagaccaaaaaggaacagaaaaccgcacactttctgccgatggctattacc

SEQ ID NO: 32760 - DNA, 582 bp, synthetic construct
  misc_feature 1..582: note = Description of Artificial Sequence: Synthetic coding sequence
  source 1..582: mol_type = other DNA
atgcacaaatggatacttacttggattcttccgaccctcctctaccggagctgcttccatatcatttgtttggtggggactatttcgcttgcatgtaacgacatgacccctgagcagatggccactaacgtgaactgttcatccccagaacgacacaccagatcgtacgattacatggaaggcggcgatatccgtgtcagacgacttttctgtagaacccagtggtacctgcgtatagacaagcggggtaaggtcaagggcactcaagagatgaagaacaactacaacattatggaaatcaggactgtcgccgtcggtattgtggcgatcaagggagtggaatcggagttttacctcgcgatgaacaaggagggaaagctgtacgcaaagaaagagtgcaacgaagattgtaactttaaggaactcatacttgagaatcattacaacacgtatgcatcagcaaagtggactcataatggaggtgaaatgtttgtggccctgaatcaaaaaggcatcccagtgcgtggcaaaaagaccaaaaaggagcaaaagaccgcacactttttgcctatggccattact

SEQ ID NO: 32761 - DNA, 582 bp, synthetic construct
  misc_feature 1..582: note = Description of Artificial Sequence: Synthetic coding sequence
  source 1..582: mol_type = other DNA
atgcataaatggattctgacttggatccttccaactctcctgtacagatcgtgctttcacattatctgtctcgtgggtactatcagcctggcttgtaatgatatgaccccagaacaaatggccactaatgtgaattgtagctcgccagaaagacacactcgatcctacgattacatggagggtggagatattagggttcggcgcctgttctgtcgcactcagtggtaccttcgaattgataaacggggaaaggttaagggcacccaagagatgaaaaacaactacaatatcatggaaatacgaacggtcgccgtgggaattgtggcaatcaaaggtgtggagtccgagttctacttggccatgaataaggaaggaaaactttacgccaagaaagagtgtaacgaagattgtaatttcaaggaactgatacttgaaaaccattacaatacttatgcttcggcaaagtggacccataacggcggcgaaatgtttgtcgcgcttaaccagaaagggattccagtgaggggtaaaaagaccaagaaagaacaaaagacggcgcatttcttgcctatggcaattacc

SEQ ID NO: 32762 - DNA, 582 bp, synthetic construct
  misc_feature 1..582: note = Description of Artificial Sequence: Synthetic coding sequence
  source 1..582: mol_type = other DNA
atgcataaatggatcttgacatggattttaccgaccttgctctatagaagttgttttcatatcatctgccttgtgggaacaatctcgttggcatgcaatgacatgacaccagagcaaatggccaccaacgttaactgctccagccctgaacgtcatacgagaagctacgattatatggaaggtggcgatattagagttcggagattattttgtcgtacgcagtggtatttgcgaatcgacaaacgaggtaaagtgaaaggtactcaagaaatgaaaaataattataatattatggaaatccggacagtagcggtaggaatcgtggctattaaaggagtcgaatcagaattttatctcgctatgaataaagaaggtaaattgtacgctaaaaaagagtgtaatgaggattgcaacttcaaagagttgattcttgaaaatcactacaatacatatgccagtgccaagtggacgcataatggaggtgagatgtttgtggcgcttaatcaaaaaggaattcctgtgaggggaaaaaaaacaaaaaaggaacagaaaacagcccatttcttgccgatggcgatcaca

SEQ ID NO: 32763 - DNA, 582 bp, synthetic construct
  misc_feature 1..582: note = Description of Artificial Sequence: Synthetic coding sequence
  source 1..582: mol_type = other DNA
atgcacaagtggattctcacctggatcctgccgacccttctctacaggtcgtgctttcatatcatctgcttggtgggaaccatctcactcgcatgcaacgatatgactccggagcaaatggcgactaacgttaactgttcatccccggagcggcatacccgctcctacgactacatggagggcggagacatcagggtccgccggttgttctgcaggactcagtggtatctgagaattgataagagggggaaggtgaaaggcacccaggaaatgaagaacaattacaatatcatggaaatccggactgtggccgttggaatcgtcgcaatcaagggagtggaatccgaattctacctcgctatgaataaggaaggaaagctgtacgccaagaaggaatgtaatgaggattgtaacttcaaggagctcattttggaaaatcattacaacacctacgcctcggcgaagtggacgcataatggcggcgagatgttcgtggcgctcaaccaaaagggaattccagtgagagggaaaaagaccaagaaagagcagaaaaccgcccacttcctcccgatggccatcact

SEQ ID NO: 32764 - DNA, 582 bp, synthetic construct
  misc_feature 1..582: note = Description of Artificial Sequence: Synthetic coding sequence
  source 1..582: mol_type = other DNA
atgcacaagtggatcctcacctggatcctccccaccctgctctacagatcatgctttcacattatctgtcttgtcggaacgatctcactggcttgtaatgatatgacgcctgaacagatggccactaacgtcaactgctcgtctcccgaaaggcacactaggagctacgattacatggagggaggagacatccgggtccgccgcctgttttgccggactcagtggtaccttcgcatcgacaaacgcggcaaggtgaaggggacccaggagatgaagaacaactacaatatcatggaaatccgtactgtggcagtcggaatcgtggctatcaagggggtggagagcgaattctacctggccatgaacaaggagggcaagctgtacgcaaagaaggagtgcaacgaggattgcaatttcaaagaacttattctcgaaaaccattacaacacctatgcgtctgcaaaatggactcataatggaggcgagatgttcgtggccctgaatcagaagggcatcccggtgagaggcaagaaaacgaaaaaagagcaaaagaccgctcacttcctgccgatggcgatcacc

SEQ ID NO: 32765 - DNA, 582 bp, synthetic construct
  misc_feature 1..582: note = Description of Artificial Sequence: Synthetic coding sequence
  source 1..582: mol_type = other DNA
atgcacaaatggatcctgacgtggatcttgccaacgctcctttaccggagctgttttcacattatctgcctcgtgggcaccatctcactcgcctgcaacgacatgacccccgaacaaatggcgactaatgtgaattgctcgagcccagaaaggcacactcgatcgtacgactacatggagggtggagacattagagtgcggcgcctgttttgtagaacccagtggtatcttcggatcgacaagcgaggaaaggttaagggtacccaggaaatgaagaacaattacaacataatggagattaggacggtggcagtgggtatcgtcgcaatcaagggcgtcgaatccgaattctacctggccatgaataaggaaggaaagctgtacgcaaagaaggaatgtaatgaggactgcaacttcaaagaacttattcttgaaaaccattacaacacttatgcgtcggcaaaatggacccacaacggtggtgagatgttcgtggccttgaaccaaaaaggaattcctgtgcgtggaaagaaaaccaagaaggaacagaaaaccgcacacttccttccaatggcaattacc

SEQ ID NO: 32766 - DNA, 582 bp, synthetic construct
  misc_feature 1..582: note = Description of Artificial Sequence: Synthetic coding sequence
  source 1..582: mol_type = other DNA
atgcacaaatggatcctcacgtggatcctgcctaccctcctgtatcggtcctgctttcacatcatttgccttgtaggcactatctcgcttgcttgtaacgatatgacccctgaacagatggccactaacgtaaactgttcgagccctgagcgccacacccgttcttacgactatatggagggaggtgatatccgagtccgtagacttttctgccgcacccaatggtatctaagaatcgacaagcgtggtaaggtaaagggaacgcaagaaatgaaaaacaattacaacatcatggagatccggactgtggccgtcggcattgttgctatcaagggcgtagaatcggagttctaccttgctatgaataaggaaggtaaactatatgctaagaaggaatgcaacgaggattgcaacttcaaggaacttattttggaaaaccattataacacgtatgcatccgcgaagtggacccacaacgggggagagatgttcgttgctttgaaccaaaagggtatccccgtgcgaggcaagaagacaaaaaaagaacagaaaacggctcactttctacccatggccattacc

SEQ ID NO: 32767 - DNA, 582 bp, synthetic construct
  misc_feature 1..582: note = Description of Artificial Sequence: Synthetic coding sequence
  source 1..582: mol_type = other DNA
atgcataagtggatcctcacctggatcctgcccacattgctctacaggtcatgttttcatatcatctgcctggtggggaccatttccttggcttgcaatgacatgacacccgagcaaatggctacaaatgtgaactgcagcagccccgagcgacatacgcgaagctacgattacatggagggcggagatatcagggttagacggcttttttgtaggactcagtggtacctcaggatcgacaaacgaggcaaggtcaagggaacacaggagatgaaaaacaattataacatcatggaaattcgaaccgttgctgtgggcatagtagctataaagggcgtggagagcgaattttatctggccatgaacaaggaaggtaaactctacgccaagaaggagtgcaacgaggattgcaattttaaagaactgattctggagaaccactataatacctatgcgagtgctaaatggacccacaacggcggagagatgtttgtggcacttaaccaaaaagggatacccgtccgcggcaaaaaaaccaagaaagaacaaaaaacggcccattttttgcccatggccatcact

SEQ ID NO: 32768 - DNA, 582 bp, synthetic construct
  misc_feature 1..582: note = Description of Artificial Sequence: Synthetic coding sequence
  source 1..582: mol_type = other DNA
atgcataaatggattttaacctggattcttcctacattgctctacaggtcgtgtttccatatcatatgcttagtcggtaccatttcattggcctgcaatgacatgacccctgaacagatggctacaaacgttaattgcagttcccctgaacgacataccaggtcctacgactacatggaagggggtgatattagagtgagaaggctcttctgtaggacccaatggtatctcagaatagataagcgaggtaaagtaaaagggacacaggaaatgaagaataactacaacattatggagatcaggacagttgcggtgggaattgtggccataaaaggagtggagtccgaattttatttagctatgaacaaggaaggtaagttgtatgctaagaaagaatgcaatgaggactgtaattttaaggagcttattctagagaatcattacaacacttatgcaagcgctaagtggactcataatgggggagaaatgtttgtggcattgaatcagaagggaattcccgttaggggtaagaaaacaaaaaaggagcagaaaactgcacattttctaccgatggcaattacg

SEQ ID NO: 32769 - DNA, 582 bp, synthetic construct
  misc_feature 1..582: note = Description of Artificial Sequence: Synthetic coding sequence
  source 1..582: mol_type = other DNA
atgcacaagtggatactgacctggatactcccaaccttgttatatcgatcctgctttcatatcatttgtttggttgggactatatcactcgcctgtaatgacatgaccccagagcagatggccaccaatgtaaactgtagttcgcccgagcggcataccagatcttacgattatatggaaggcggagatatcagagtcagacgtttgttctgccggactcaatggtatctgcgtatcgacaagaggggaaaggtaaagggaacccaggagatgaaaaacaactataatattatggagatacgcactgtagcagttggcatcgttgctattaagggagttgaaagcgagttttacttagctatgaacaaggagggaaaactatatgctaaaaaagaatgcaacgaggattgtaattttaaagaactgatacttgagaatcactataatacctacgcatcagccaagtggacacataacggtggagagatgtttgtggccctgaaccagaaggggatccccgtacgcggaaagaaaactaaaaaggagcagaaaacagcacacttcctgcccatggcgattaca

SEQ ID NO: 32770 - DNA, 582 bp, synthetic construct
  misc_feature 1..582: note = Description of Artificial Sequence: Synthetic coding sequence
  source 1..582: mol_type = other DNA
atgcacaagtggattctaacctggatactgcctacgctactgtacagaagctgcttccatatcatatgcttggtgggcactatcagtctagcatgtaatgatatgacccccgagcagatggccactaacgtcaactgcagttcccccgagaggcatacccgatcctacgactatatggaaggcggtgatatcagagtgcgcaggttgttctgcaggacccagtggtatctgcgaatcgacaaacggggaaaggtgaagggtacccaggagatgaagaacaattataacataatggaaatcaggacggttgctgttggtatcgtcgccatcaagggcgtagaaagcgaattctacttggctatgaataaggagggtaagctgtacgcgaagaaagaatgtaacgaggactgcaacttcaaggagctcattctggaaaatcactataacacatatgcttcggccaaatggacccataacggaggtgagatgtttgtagcactaaatcaaaaaggcatccctgtgcggggaaaaaaaaccaagaaggaacagaagacagcacactttcttccaatggcaattacc

SEQ ID NO: 32771 - DNA, 582 bp, synthetic construct
  misc_feature 1..582: note = Description of Artificial Sequence: Synthetic coding sequence
  source 1..582: mol_type = other DNA
atgcacaaatggatactgacatggatactgcccacattgctgtataggagctgcttccatatcatctgtctggtaggtacaatcagcctcgcctgcaacgacatgacacccgaacagatggccactaatgtgaattgcagtagccctgagagacatacccgatcctatgattacatggaaggtggcgacatacgggtgcggcgcctgttttgccgcacccagtggtatctgcgcatcgataaacggggaaaagtaaagggaacgcaggagatgaagaataactacaacataatggaaatccgaacagttgcagtggggattgtggcaatcaagggagtggaatccgagttctatctcgccatgaataaggagggcaagctgtatgcaaaaaaagaatgcaatgaagattgtaattttaaggaattgattcttgagaaccattataacacatacgcaagtgcaaaatggacgcataatggtggagagatgtttgttgccctgaatcagaaggggatccctgtgcgagggaagaagaccaaaaaggaacagaagacagcacactttttgcctatggctattacc

SEQ ID NO: 32772 - DNA, 582 bp, synthetic construct
  misc_feature 1..582: note = Description of Artificial Sequence: Synthetic coding sequence
  source 1..582: mol_type = other DNA
atgcataagtggatccttacttggattcttccgactctgctgtaccggtcgtgttttcatatcatctgtctcgtgggaaccatatccctggcgtgtaacgatatgacccctgaacaaatggcaactaacgtcaactgttcttccccagaacgtcatactagatcgtacgattacatggagggcggcgacatccgagtgcgacggcttttctgtcgaacccagtggtaccttagaattgacaaacgcggtaaggtcaagggaacccaagaaatgaagaacaactacaatatcatggaaattagaacggtggccgtgggcattgtggcgatcaaaggtgtcgagtccgaattctacctggcgatgaataaagagggtaaactgtacgctaagaaggaatgcaatgaggattgcaactttaaagaactcattctggaaaaccactacaacacctacgcctccgcgaagtggactcacaacggaggagagatgtttgtggcacttaaccaaaaaggaattcctgtgcgcggcaaaaagaccaagaaggaacaaaagacggcccacttccttcccatggcaattacc

SEQ ID NO: 32773 - DNA, 582 bp, synthetic construct
  misc_feature 1..582: note = Description of Artificial Sequence: Synthetic coding sequence
  source 1..582: mol_type = other DNA
atgcacaagtggatcctcacctggattctcccaactcttctttaccggtcgtgtttccatatcatctgtcttgtgggaactatttcgctcgcatgtaacgatatgacccctgaacagatggcaaccaacgtcaactgttcctcgccagaaagacatacgagatcgtacgattacatggaaggaggtgacatacgggtgcgcagacttttctgtagaacccaatggtaccttagaattgacaaacggggaaaggttaagggaactcaagaaatgaagaacaactacaatatcatggaaattcgaaccgtggctgtggggattgtggccattaagggagtggagtcagaattctaccttgcaatgaacaaagaaggaaagttgtacgccaaaaaggaatgtaatgaagattgcaactttaaagaacttattctggagaaccactacaacacttacgccagcgccaagtggacccataacggaggtgaaatgttcgtggcactgaatcaaaaagggattcccgtgagggggaagaaaacgaagaaagagcaaaagactgcacatttcctccccatggcaataact

SEQ ID NO: 32774 - DNA, 582 bp, synthetic construct
  misc_feature 1..582: note = Description of Artificial Sequence: Synthetic coding sequence
  source 1..582: mol_type = other DNA
atgcataagtggatccttacttggatcttgccaactctgttgtaccgcagttgttttcacatcatttgccttgtgggtaccattagcctggcttgcaacgatatgacacccgagcagatggccaccaacgtcaactgcagctcccctgagagacataccaggtcctatgattatatggagggaggcgacatccgtgtgcgccgcctgttctgcaggacccaatggtacctcagaattgacaaacgcggtaaagtcaaaggaactcaggagatgaagaataactacaacatcatggagatcaggaccgtagctgtgggcatcgtggctattaaaggtgtggagagtgagttttatctcgccatgaacaaggagggaaagctgtatgcaaagaaagaatgcaacgaagactgtaacttcaaggagctgatcctcgagaaccactacaacacctatgcttctgctaagtggacacataacggtggtgagatgtttgtggccctgaatcagaagggtattcccgtccgcggtaagaagactaagaaagaacagaagactgctcatttcctccccatggccatcacc

SEQ ID NO: 32775 - DNA, 582 bp, synthetic construct
  misc_feature 1..582: note = Description of Artificial Sequence: Synthetic coding sequence
  source 1..582: mol_type = other DNA
atgcataagtggatcctcacctggatcctgcctactctgctctacaggagctgcttccatatcatctgcttggtcggtaccatttccctggcttgtaatgatatgactcctgaacaaatggcaaccaacgtgaactgctcgtcgccggaacgccatactcggtcgtacgactatatggaaggaggagacattcgcgtgcggcgcctcttttgtcgaacccagtggtacctgcggattgataaaagaggaaaggtgaagggaactcaggagatgaagaacaattacaacataatggaaatccggaccgtagcggtgggcatcgtggcgatcaagggagtcgagtccgagttttacttggcgatgaacaaagaaggaaagctctacgccaagaaggagtgcaatgaagattgtaatttcaaggaactgatcctggagaaccactacaatacctacgcctcggcaaagtggactcacaacggcggagagatgttcgtcgcactcaaccagaagggcattccggtgcggggcaaaaagactaaaaaggagcaaaagactgctcacttcctgccgatggcgatcacg

SEQ ID NO: 32776 - DNA, 582 bp, synthetic construct
  misc_feature 1..582: note = Description of Artificial Sequence: Synthetic coding sequence
  source 1..582: mol_type = other DNA
atgcataagtggatcctgacttggatactgccaactctgctttaccgcagctgttttcacatcatatgtcttgtgggtaccatttcgttggcctgtaatgatatgactcccgaacagatggcaaccaatgtcaattgcagctcaccagagaggcacaccagatcttacgactatatggaagggggcgatattcgtgtgaggcgacttttctgccgaacccagtggtaccttagaatcgacaagcgtggaaaggtgaaaggaacccaggaaatgaaaaacaactataacatcatggaaattaggactgttgcagtcggcattgtggctattaagggtgtggaatcagagttctacctcgccatgaataaagaaggaaagctctacgctaagaaagagtgcaatgaggattgtaactttaaggaactgatcctggagaaccactacaatacctatgcatcagcgaagtggacccacaacggaggcgaaatgtttgtcgccctgaaccagaaggggatacctgtgcgtggaaaaaagaccaagaaggaacaaaagacggcacattttctcccgatggccataacc

SEQ ID NO: 32777 - DNA, 582 bp, synthetic construct
  misc_feature 1..582: note = Description of Artificial Sequence: Synthetic coding sequence
  source 1..582: mol_type = other DNA
atgcacaaatggattctcacttggatcctgccgactctgctttacagatcctgctttcacataatctgcctggtgggcacgatcagccttgcctgcaacgacatgaccccagaacagatggccactaacgtcaactgttcgagcccggagagacatacccgatcatacgactacatggaaggcggagacatccgcgtgagacgtctgttctgcaggacgcagtggtacctgcggattgataagaggggcaaggtgaagggaactcaggagatgaagaacaattacaatatcatggaaatccgcaccgtggcagtggggatcgtggcgatcaagggcgtcgaaagcgagttctacctcgctatgaataaggagggtaagttgtacgcgaaaaaagagtgcaacgaggattgcaacttcaaggagctcattctggaaaaccactacaatacctacgccagcgccaaatggactcataatggaggagagatgttcgtggcgctgaaccagaaaggaatcccggtgagaggcaagaaaaccaagaaagagcaaaagaccgcacatttcctccccatggccataact

SEQ ID NO: 32778 - DNA, 582 bp, synthetic construct
  misc_feature 1..582: note = Description of Artificial Sequence: Synthetic coding sequence
  source 1..582: mol_type = other DNA
atgcacaaatggatcttgacttggatcctcccaacccttttgtacagatcatgctttcacataatttgcctggtgggaacgatctcgctggcctgcaacgatatgactccagaacagatggcgaccaacgtcaactgttcctcccctgagagacatacgcgcagctacgactacatggagggcggagacattcgggtgagacgcctgttctgccgcacgcaatggtatctgcgcatcgacaagagaggaaaggtgaaaggcactcaagaaatgaagaacaattacaacatcatggagatacggaccgttgcggtggggatcgtggccatcaagggagtcgagagcgaattctacctcgcgatgaacaaggaggggaaattgtacgccaaaaaggagtgtaatgaagattgcaacttcaaggagctcatcctggagaatcattacaacacctatgcctcggcaaagtggactcacaacggtggcgagatgtttgtcgcactgaatcaaaagggcatccctgtgcgcggaaagaagactaagaaggaacagaagaccgcacacttccttcccatggctatcact

SEQ ID NO: 32779 - DNA, 582 bp, synthetic construct
  misc_feature 1..582: note = Description of Artificial Sequence: Synthetic coding sequence
  source 1..582: mol_type = other DNA
atgcataaatggatcctgacctggatccttccgaccctcctgtaccggagctgttttcatatcatctgtttggtgggaaccatcagcctggcgtgcaatgacatgacgcctgaacaaatggccaccaatgtcaactgttcttcccctgaacggcacactcggagctatgattacatggaggggggtgatatccgggtgagaaggctcttctgtcgcactcagtggtacctgcgcatcgacaaaagagggaaggtgaagggaacccaagaaatgaagaataactacaacattatggagatccgcaccgtggcggtggggattgtcgccatcaagggcgttgaatcagaattctacctcgcaatgaacaaggagggaaagttgtatgcgaaaaaggaatgcaatgaggactgcaatttcaaagagctgatcctggagaatcattacaacacctacgcgtccgctaagtggacccacaacggcggcgaaatgttcgtcgccctcaatcaaaagggaatccctgtgaggggcaagaaaaccaagaaagagcaaaagactgctcattttctgcctatggccatcact

SEQ ID NO: 32780 - DNA, 582 bp, synthetic construct
  misc_feature 1..582: note = Description of Artificial Sequence: Synthetic coding sequence
  source 1..582: mol_type = other DNA
atgcacaagtggatcctcacatggatcctcccgacgttactgtaccgatcttgtttccatatcatttgcctagttggcaccattagcctggcttgtaacgacatgacacctgagcagatggccacaaacgtaaactgctcttcccctgaacgccacactagatcctatgattatatggagggaggggacatccgcgtcaggcggttgttctgtcgcacccagtggtaccttcgaatagacaagcgcggcaaggtaaagggaacgcaggagatgaaaaataactacaatataatggagatcagaaccgtagccgtggggatcgtcgcgattaaaggagtggagagcgagttttatctggccatgaacaaagaggggaagttatacgctaaaaaggagtgcaatgaggattgcaatttcaaggaattaattcttgaaaaccactataacacgtatgccagcgcaaagtggacccataacggcggcgagatgttcgtggccctgaatcaaaaaggtatccctgtgcgggggaaaaagaccaaaaaggagcagaagaccgcccattttcttccaatggccatcaca

SEQ ID NO: 32781 - DNA, 582 bp, synthetic construct
  misc_feature 1..582: note = Description of Artificial Sequence: Synthetic coding sequence
  source 1..582: mol_type = other DNA
atgcataaatggatcctgacctggattctccccaccctgctgtaccgctcatgtttccacattatctgcctggttggcactatctccctggcttgtaatgatatgacgccagaacagatggcgaccaatgtgaactgcagctcgcccgaacgccacactcgctcgtacgactacatggaaggtggagacatacgcgtgaggagactgttctgtaggacccagtggtaccttcgcatcgacaagagaggtaaggtcaaagggacccaagaaatgaagaacaactacaacattatggaaatccgcactgtcgctgtggggatcgtggcgatcaaaggagtggaatccgaattctacctggcgatgaataaggaaggcaagttgtacgcaaagaaggaatgcaatgaggactgcaacttcaaggagctcatcctcgaaaatcactataacacttacgcatcggcgaaatggactcataatggaggagaaatgttcgtggccctgaaccagaagggtattccggtgagggggaagaaaaccaaaaaagagcagaaaaccgcccactttctgccgatggcaatcact

SEQ ID NO: 32782 - DNA, 582 bp, synthetic construct
  misc_feature 1..582: note = Description of Artificial Sequence: Synthetic coding sequence
  source 1..582: mol_type = other DNA
atgcataaatggattctcacttggattctccccaccttgctttataggtcttgttttcatattatatgtctggtgggcactataagtctggcctgcaacgacatgacccccgagcagatggccacaaacgtcaactgttcttcacccgaacgacacacacggtcttatgactatatggagggtggagacatacgcgtccgccgcctgttttgcagaacccagtggtacctccgcattgataagcgaggcaaagtgaaaggaactcaggagatgaagaataattacaatatcatggaaatacggactgtagctgtagggatcgtggcaatcaaaggggtcgagtctgagttctatctcgccatgaataaggaaggtaaactctatgcaaaaaaggaatgcaacgaagactgcaactttaaagagctgatcctggagaaccactacaacacctatgcctccgcaaagtggacacataacgggggcgaaatgtttgtcgcgctcaatcagaaaggtatccccgtgcgcggaaagaaaaccaagaaggaacaaaaaacagctcacttcctccccatggcaataacc

SEQ ID NO: 32783 - DNA, 582 bp, synthetic construct
  misc_feature 1..582: note = Description of Artificial Sequence: Synthetic coding sequence
  source 1..582: mol_type = other DNA
atgcataaatggattctcacctggattctgcccactcttctgtaccggagctgttttcacattatctgtctggtgggcactatttcgctggcctgcaacgacatgacccccgaacagatggcaacgaatgtgaactgctcctcacctgagcgtcacaccagatcgtacgattacatggaaggaggagatatcagagtgagacgcctcttctgtcgtactcaatggtacttgagaatcgataagagagggaaggtcaaaggaactcaggagatgaagaataactataacatcatggaaatcaggactgttgctgtgggaattgtggccatcaagggggtggagtcagagttttacctcgcaatgaataaagaaggcaaactttacgccaagaaagagtgcaatgaagattgtaactttaaggaactgattctggaaaaccactacaacacctacgcttcggcaaagtggacccataacggcggcgaaatgttcgtggcacttaaccaaaagggcattccggtccgcgggaagaaaacgaagaaggaacaaaagacggcccactttctcccaatggctataacc

SEQ ID NO: 32784 - DNA, 582 bp, synthetic construct
  misc_feature 1..582: note = Description of Artificial Sequence: Synthetic coding sequence
  source 1..582: mol_type = other DNA
atgcataagtggatccttacttggatcctgcctacgctcttgtaccgctcctgcttccacatcatttgcctcgtcgggaccatcagcctcgcctgtaatgacatgaccccggagcagatggcaactaatgtgaactgctcgtcgccggagcgccatactcggtcatacgattacatggaaggaggggatatccgcgtcagacggctgttttgccgcacccaatggtacctgcgaatcgacaagagaggtaaggttaagggaactcaggaaatgaaaaataactataacattatggaaatcaggaccgtggctgtcggaattgtggctatcaagggcgtggaatccgagttttacctggcaatgaacaaggaaggcaagctgtacgccaagaaagaatgtaacgaggactgcaacttcaaagagctgatcttggagaatcactacaacacctacgcgagcgccaaatggacccacaatggaggagaaatgttcgtggcgctgaaccagaagggaatccccgtgcggggcaagaaaacgaagaaagaacaaaagactgcccacttcctcccaatggcgatcacc

SEQ ID NO: 32785 - DNA, 582 bp, synthetic construct
  misc_feature 1..582: note = Description of Artificial Sequence: Synthetic coding sequence
  source 1..582: mol_type = other DNA
atgcataagtggatcctaacctggatattgcctaccttattgtataggtcctgttttcatatcatttgcctagtggggaccatctccctagcctgcaatgacatgacccccgagcagatggccacaaatgtgaactgtagctccccggaacggcacacccgatcttacgattacatggagggaggcgacatacgcgttaggagattattctgtcgcacccaatggtatctgaggattgacaaacgagggaaagtgaagggaacacaggaaatgaaaaacaactataacatcatggagattcgcaccgtggcggtgggcatagtggccattaagggagtggagtccgagttctatctggcaatgaataaggagggaaagctgtacgccaagaaggaatgcaacgaggattgtaacttcaaggaactcatcctggagaaccactacaacacttacgcgtctgcaaaatggacccataatggtggtgagatgttcgtggcattgaaccagaaaggtataccggttcgtggtaaaaagactaaaaaggagcagaaaactgcacacttcctgcctatggcgattact

SEQ ID NO: 32786 - DNA, 582 bp, synthetic construct
  misc_feature 1..582: note = Description of Artificial Sequence: Synthetic coding sequence
  source 1..582: mol_type = other DNA
atgcataaatggattctcacatggatactgccaactttattgtaccgaagttgtttccatatcatttgcttggttggcaccatatctctggcgtgcaacgatatgacaccagagcaaatggctacaaacgtcaattgcagttcccctgagcggcacacccgtagctacgactacatggagggcggcgacataagggtgcgacggctcttctgcagaacccagtggtatcttcgcattgacaagaggggaaaggtgaagggcactcaggagatgaagaataactacaacatcatggagatccggaccgtggctgtgggcatagtggccatcaagggggtagagtcagagttctacctcgccatgaataaagagggaaagctgtacgctaagaaagaatgtaacgaggattgtaattttaaggaactgattcttgagaaccattacaatacctacgcaagtgctaaatggacgcataacggaggtgagatgtttgttgcactcaaccaaaaggggatccctgtgcgagggaaaaagaccaagaaagagcagaagaccgcccattttctcccgatggccatcaca

SEQ ID NO: 32787 - DNA, 582 bp, synthetic construct
  misc_feature 1..582: note = Description of Artificial Sequence: Synthetic coding sequence
  source 1..582: mol_type = other DNA
atgcataagtggatcctcacctggatactgcccaccctattatatagatcgtgttttcacataatctgcctggtggggactatctctttggcctgcaacgatatgaccccagagcagatggctaccaacgtgaactgttcctctccggaacgacataccagatcatacgactacatggaggggggagacattcgagttaggagactattctgtcgcacacagtggtatctgcgaattgacaagcgggggaaggttaaaggtactcaggagatgaaaaataattacaacatcatggagattaggactgttgccgtgggcatcgtggccattaagggcgtcgaatccgagttttacctggccatgaacaaagaaggcaagctgtatgcgaagaaggaatgcaacgaagactgtaactttaaagagctcatacttgaaaatcattacaacacgtacgctagcgccaagtggacgcacaacgggggagagatgtttgtggctctaaatcagaaaggtatacctgtgaggggaaaaaaaacaaaaaaggaacagaaaaccgcacacttcttgccgatggcgatcact

SEQ ID NO: 32788 - DNA, 582 bp, synthetic construct
  misc_feature 1..582: note = Description of Artificial Sequence: Synthetic coding sequence
  source 1..582: mol_type = other DNA
atgcacaaatggatccttacttggatcctgcctactttgctgtaccggtcatgcttccacattatctgcctggttggcaccatttcccttgcttgtaatgacatgactccagaacagatggccaccaatgtgaactgctcgtccccggaacgccatacgcgctcatacgactacatggaaggcggggacatccgggtgagacgcctcttctgcagaacccagtggtacttgaggatagacaaacggggaaaagtcaagggaactcaggaaatgaagaacaattacaacatcatggaaattcggaccgtcgcagtggggatcgtggccatcaagggtgtggaatcagaattctacctggctatgaacaaggaggggaaactgtacgccaagaaagagtgtaatgaggactgcaactttaaagaactgatcttggaaaaccactacaacacgtacgcgtcggcgaagtggacccataacggtggcgaaatgttcgtggctctcaaccaaaaggggattcccgtccgaggaaagaaaaccaagaaggaacagaaaactgcgcatttccttccgatggccatcacg

SEQ ID NO: 32789 - DNA, 435 bp, synthetic construct
  misc_feature 1..435: note = Description of Artificial Sequence: Synthetic coding sequence
  source 1..435: mol_type = other DNA
atggcaacctgggcactcttactcctcgccgcaatgttgctggggaatccgggtcttgtcttttctcgtttatccccagagtactacgatcttgcccgagctcacctgagggacgaggaaaagtcttgtccttgcctcgcgcaagaaggtccacaaggcgaccttcttaccaaaacacaggagctgggcagagattatcgaacctgcctgaccattgttcagaagctgaagaagatggtggacaaacctacccaacgtagtgtttctaatgcagccacacgtgtttgccgtacaggccgctcgcggtggagagatgtctgccgtaatttcatgaggcggtaccaaagtcgggttacgcaagggcttgtcgctggcgagactgcacagcaaatatgcgaagatttgcgtctttgtattcccagtacagggcctctc

SEQ ID NO: 32790 - DNA, 435 bp, synthetic construct
  misc_feature 1..435: note = Description of Artificial Sequence: Synthetic coding sequence
  source 1..435: mol_type = other DNA
atggccacatgggccctgctgctgcttgctgccatgttgttggggaacccaggtctggtgttttccagactgtcgcccgagtactacgaccttgctagggcacacttgcgggacgaagaaaaatcttgtccctgtctggcgcaggagggtccccagggggacttgctgactaagacccaggagcttgggagggattacaggacatgtctgaccatcgtccagaaactaaagaagatggtagacaagccaacccagaggtcagtgagcaacgcagcaacacgggtctgcagaacagggcggagcaggtggagagatgtttgccggaattttatgagacgctatcagtcccgcgtcacgcaaggcctagtggcaggtgaaaccgctcagcaaatttgcgaggatctgcggctgtgtatcccatccacagggcctctg

SEQ ID NO: 32791 - DNA, 435 bp, synthetic construct
  misc_feature 1..435: note = Description of Artificial Sequence: Synthetic coding sequence
  source 1..435: mol_type = other DNA
atggcgacttgggctctgctgctgctcgccgctatgctgctgggaaaccctggtctggtcttttcgcggctcagcccggagtactacgatctcgcgcgcgcccatctgcgggatgaagagaagagctgcccgtgcctggcccaagaggggccgcagggtgacctgcttaccaaaactcaggagttgggccgcgactaccgtacttgcctcaccatcgtgcaaaagctgaagaagatggtggacaagcctacccagcggtcggtgtccaacgcagcgactcgggtctgccggactggacggtcccggtggcgggacgtgtgcagaaatttcatgcgccggtaccagtcgcgggtcacccaaggactcgtggccggagaaacggcccaacagatctgcgaggacctcaggctctgtatcccgtccacgggcccactc

SEQ ID NO: 32792 - DNA, 435 bp, synthetic construct
  misc_feature 1..435: note = Description of Artificial Sequence: Synthetic coding sequence
  source 1..435: mol_type = other DNA
atggccacttgggcgctcctgctcctggctgcaatgttgctcggcaacccaggcctcgtcttcagcaggctctccccagaatactatgatcttgccagagctcacctcagggacgaggagaaatcctgtccctgcctggctcaggaaggccctcaaggtgacctgctgaccaagacccaggagctgggccgcgactatcgcacgtgtctcactattgtgcagaagctgaagaagatggttgataaacctactcaaagatccgtgtccaacgcagctacccgcgtatgccgcacaggccgctccaggtggagggacgtgtgccgcaacttcatgcgccgctaccagagcagggtgactcagggcctggtggccggagagactgctcaacagatctgcgaggacctccgcctgtgtattccttctaccggccctctg

SEQ ID NO: 32793 - DNA, 435 bp, synthetic construct
  misc_feature 1..435: note = Description of Artificial Sequence: Synthetic coding sequence
  source 1..435: mol_type = other DNA
atggctacttgggcgctgctgctcctggcagctatgctgttggggaaccctggtctggtgttctcacgcctgtcccctgagtactacgacttagctagggcccatctccgagatgaggagaagagttgcccgtgtctggcacaggaggggcctcaaggggatctcttaaccaaaactcaagagctggggagggactacaggacctgcttaacaatcgtgcagaaactcaagaagatggtggacaaaccaacccagcgctcggtaagcaatgctgctacccgggtgtgtaggactggacggtcacggtggcgcgatgtgtgcaggaatttcatgcgccggtatcagtcgagagtcacgcaggggctagtggccggggaaaccgcgcagcaaatatgcgaagacctcagattgtgcattccctccacgggtccgttg

SEQ ID NO: 32794 - DNA, 435 bp, synthetic construct
  misc_feature 1..435: note = Description of Artificial Sequence: Synthetic coding sequence
  source 1..435: mol_type = other DNA
atggcgacttgggcattgctgctcctggccgcgatgctgctgggcaacccgggactggtgttctcccgtctctcgccagagtactacgatctcgcgcgcgcgcacctgagggacgaagagaagtcgtgcccgtgcctggcccaagaaggaccccagggagatctcttgaccaagactcaagaactcggccgcgactaccggacttgccttacgatcgtccaaaaactgaaaaagatggtggataagccaacccagcgctcagtctcaaacgccgctacccgcgtctgccggactgggcggagccgctggcgagacgtgtgtcggaacttcatgcgccgctaccagtcgagggtgacccagggactcgtggccggcgaaaccgcacagcaaatctgtgaggacctgagactgtgtattccgtccaccggacctctg

SEQ ID NO: 32795 - DNA, 435 bp, synthetic construct
  misc_feature 1..435: note = Description of Artificial Sequence: Synthetic coding sequence
  source 1..435: mol_type = other DNA
atggcaacgtgggcacttctgctgctcgctgccatgttgcttggcaaccctggactcgtgttttccaggctgtctcctgagtactacgacctggcacgcgcgcacctgagagacgaagaaaagtcatgcccgtgtctcgcccaagagggccctcaaggtgacctgctcaccaagacccaggagttgggaagagattatcgcacctgcttgactatcgttcaaaagctcaagaaaatggtggataagccgactcagaggtcggtgtccaatgccgccacccgagtctgccgtacgggacgctcaaggtggcgcgacgtgtgccgcaacttcatgagacgctaccagagtagagtgactcaggggctcgtcgctggagaaactgcacagcagatctgtgaagatttgcgcctctgcattcctagcaccggtccgctc

SEQ ID NO: 32796 - DNA, 435 bp, synthetic construct
  misc_feature 1..435: note = Description of Artificial Sequence: Synthetic coding sequence
  source 1..435: mol_type = other DNA
atggccacttgggctcttctgctactggcggcaatgctgttggggaacccaggcctggtattctctcgcctctcccccgagtattacgacctcgccagagcgcatcttcgcgatgaagaaaaaagttgcccttgtttggctcaggaagggcctcagggggatttactgaccaagactcaggagctgggtagggactaccgaacctgcctaacgattgtgcagaagttaaagaagatggtagacaagcccactcagaggagcgtctctaatgctgctacccgggtgtgcaggactggacgttcaaggtggcgcgatgtgtgtcgaaacttcatgcgcaggtaccagtccagggtgactcagggcttggtggcaggagagactgcccagcagatttgcgaggatttacgactttgtataccatccactggaccgctc

SEQ ID NO: 32797 - DNA, 435 bp, synthetic construct
  misc_feature 1..435: note = Description of Artificial Sequence: Synthetic coding sequence
  source 1..435: mol_type = other DNA
atggctacctgggcacttttgctgctggccgctatgcttcttggaaatccgggtctggtcttttccagactttccccagaatactacgatctggccagagcacacctccgcgacgaagaaaagagctgtccttgtctggcacaagagggacctcagggagatctccttactaagactcaagaactcggccgcgattaccggacttgtctgaccattgtgcaaaagctgaaaaagatggtggataagccaactcaacgctcggtgagcaacgctgcaactagagtgtgtcgaactggtcgatcacgctggagggacgtgtgcagaaacttcatgaggaggtaccagtcaagagtgacccaaggtctggtcgccggagaaaccgcacagcagatatgtgaggaccttagactttgtattccttctaccgggcctctg

SEQ ID NO: 32798 - DNA, 435 bp, synthetic construct
  misc_feature 1..435: note = Description of Artificial Sequence: Synthetic coding sequence
  source 1..435: mol_type = other DNA
atggcaacatgggcacttcttcttctggctgctatgctactcggaaaccctggactggtattttctcggcttagtccagaatattacgatttagcgagggcccatttaagagacgaagagaaatcttgcccctgcctggctcaagaaggaccacagggagacctcctgactaaaacacaggaattagggcgcgattataggacatgtcttactattgttcaaaagttaaagaagatggtagataaacccacacaacggtccgtatccaatgcagctacaagagtgtgccggacaggaaggtccagatggagagatgtctgtcggaatttcatgcgacgctatcagtcacgggtgacacagggattagtggcaggggagactgcgcagcagatttgcgaagaccttaggctgtgcatcccctcaactgggcccctc

SEQ ID NO: 32799 - DNA, 435 bp, synthetic construct
  misc_feature 1..435: note = Description of Artificial Sequence: Synthetic coding sequence
  source 1..435: mol_type = other DNA
atggccacgtgggctctccttctgctcgccgccatgctcctgggtaatccagggctggtcttcagcagactctcgccagaatattatgacctggcacgcgcccatttgcgagatgaagaaaagtcgtgcccctgcctcgcgcaggagggtcctcagggagacctgctgacgaagacgcaggagttgggcagggattatcgcacgtgcctaaccattgtacagaaactgaaaaagatggtggataaacccacccaacgttcagtcagcaatgccgccacccgtgtgtgtcgcacaggccgctcgcgttggcgcgacgtgtgtcgaaacttcatgcggagataccagagcagagtgactcagggactcgttgccggcgaaaccgctcaacagatttgcgaggatctgcgactttgcatcccgtcgacaggccctctc

SEQ ID NO: 32800 - DNA, 435 bp, synthetic construct
  misc_feature 1..435: note = Description of Artificial Sequence: Synthetic coding sequence
  source 1..435: mol_type = other DNA
atggcaacttgggcccttcttttgctcgcagcaatgctgctgggaaacccagggctcgtcttttcacgcctctcgccagagtactacgatctcgctagagcccatctgcgggacgaagaaaaatcctgtccttgcctggcacaggaaggacctcagggggatctgctcaccaagactcaagaactcggtcgagactaccggacctgtctgacgatagtccagaaactcaagaagatggtggataagcctacccagagaagcgtgtcgaacgccgcgacccgtgtgtgtcgaactggtcgtagccgctggagagatgtgtgtaggaatttcatgagacgataccagtcgcgggtcacccaaggactggtggcaggcgaaaccgcacagcaaatctgcgaggatttgagactctgtatcccgtcgaccgggcctctg

SEQ ID NO: 32801 - DNA, 435 bp, synthetic construct
  misc_feature 1..435: note = Description of Artificial Sequence: Synthetic coding sequence
  source 1..435: mol_type = other DNA
atggcgacttgggcactccttctcctcgccgctatgcttctgggtaaccctggtcttgtcttttcaagactttcacctgagtactacgacctcgccagggcacatcttagagatgaggaaaaatcgtgcccttgtcttgcgcaggaagggcctcagggagatctgcttaccaagacccaggagttgggccgagattaccgcacttgcctgactattgtgcaaaagctgaagaagatggtcgacaaacccacccaacgaagcgtcagcaacgccgcgaccagggtctgcaggaccggcagatcgcgctggcgtgatgtgtgtcggaactttatgcgcagatatcagtcccgtgtcacccaagggctggtggcaggtgaaacggcacaacagatttgcgaggatcttcgcctttgtattccttccaccggacctctt

SEQ ID NO: 32802 - DNA, 435 bp, synthetic construct
  misc_feature 1..435: note = Description of Artificial Sequence: Synthetic coding sequence
  source 1..435: mol_type = other DNA
atggccacctgggctctgctccttctggcagctatgctcctgggtaaccctggccttgtcttttcgagactgtcccctgagtactacgaccttgcacgtgcccatcttagagacgaggaaaagagctgcccctgcctggcccaagaaggaccccagggagatctgctgacgaaaactcaggaacttggaagagactacaggacctgcctcaccattgtgcaaaagctgaagaagatggtggacaaacctacgcagagatccgtgtcaaatgcagcaactcgggtttgtcgcactggaagaagcaggtggagagatgtgtgtaggaactttatgcgacgctaccaatccagagtgacccaaggccttgtcgccggcgaaaccgctcagcaaatctgtgaggatctgagactgtgtattccatcgaccggtcctctc

SEQ ID NO: 32803 - DNA, 435 bp, synthetic construct
  misc_feature 1..435: note = Description of Artificial Sequence: Synthetic coding sequence
  source 1..435: mol_type = other DNA
atggcaacttgggccttactgctgctggccgcgatgctgttgggcaaccctggtttggttttctcgcgtctttccccagagtactacgacctggctcgagcacatctgcgcgacgaagagaagtcttgcccgtgcctcgctcaggaaggtccccaaggcgacctgctgactaagacacaagaactcgggagagactacaggacttgtctcaccatcgtgcagaagctgaaaaagatggttgacaaacccacgcagcgtagcgttagtaacgcggccaccagggtgtgtcgaacgggccgcagtcgctggcgggacgtttgccggaactttatgcgccggtatcagtcgcgggtcactcagggtctggtggccggtgaaactgctcaacaaatctgtgaggatctcagactttgtatcccatctaccggccctctg

SEQ ID NO: 32804 - DNA, 435 bp, synthetic construct
  misc_feature 1..435: note = Description of Artificial Sequence: Synthetic coding sequence
  source 1..435: mol_type = other DNA
atggccacatgggctttgctgttgctggctgcgatgctgttagggaatccagggctcgtgttttcgcgactcagtccagaatattatgacctggcacgggcccatctgagagatgaagagaagagctgtccctgtctggcccaggaaggccctcagggtgacttactgactaaaacacaggaactaggtagggattacagaacatgcctgaccattgttcaaaaattgaagaaaatggtggacaaacctacccagcggtccgtgagcaacgcggcaacacgtgtttgtagaaccggacgttctcgctggagggatgtgtgtcgcaatttcatgcgtaggtatcaatcaagggttacccagggcctcgttgctggggaaacggcccagcaaatctgtgaagacctgcgcctgtgtataccttccactggtcctctg

SEQ ID NO: 32805 - DNA, 435 bp, synthetic construct
  misc_feature 1..435: note = Description of Artificial Sequence: Synthetic coding sequence
  source 1..435: mol_type = other DNA
atggcaacttgggcgctccttctcctggccgccatgctcctcggaaacccgggacttgtcttttcgagactttcgccggaatactacgatcttgcgagagctcacctgcgcgatgaagaaaagtcgtgtccgtgcctggctcaagaggggccgcagggtgacctgcttaccaagacccaggaactgggccgcgactataggacctgcctgaccattgtccaaaaactgaagaaaatggtggacaagccgacgcagaggagcgtgtcaaatgcagccactcgcgtttgtcgcaccggccgctctcggtggcgggacgtctgccgcaatttcatgagacgctaccagtcgcgggtcactcagggactcgttgcgggtgaaaccgcccaacaaatctgtgaggacttgcgcctgtgcatcccatccaccggaccgctg

SEQ ID NO: 32806 - DNA, 435 bp, synthetic construct
  misc_feature 1..435: note = Description of Artificial Sequence: Synthetic coding sequence
  source 1..435: mol_type = other DNA
atggccacatgggcgctgctgctgctggcagcaatgctattgggaaacccaggattggtttttagccgcctgagtccagaatattacgatctggccagagcgcacctgagagatgaagaaaaatcctgtccatgccttgcccaggaagggccacagggagacctgctcactaagacccaggagctaggtagggactatcgcacctgtttaacaattgtccagaaactgaagaaaatggtggacaagcctacccaaaggtctgtctcaaatgctgcgacgagggtgtgccgtacaggaagatcgaggtggcgtgacgtctgtaggaactttatgcgccgttatcagtctcgcgtgacgcagggtcttgtggcaggtgagactgcacagcagatatgcgaggatcttagactatgtattccgagtaccgggcccttg

SEQ ID NO: 32807 - DNA, 435 bp, synthetic construct
  misc_feature 1..435: note = Description of Artificial Sequence: Synthetic coding sequence
  source 1..435: mol_type = other DNA
atggctacatgggctctgttgcttctggctgcaatgctgctgggcaaccctggattggtgttctctaggttgtctcccgaatactacgacctcgcacgtgctcacctcagagacgaagagaaaagttgcccatgcctggcacaagagggacctcaaggtgacctcttgacaaagactcaagaactgggaagggattaccgtacttgtctgaccatcgtgcagaaattgaagaagatggtcgacaaaccaactcaacgctccgtatccaacgcagccaccagagtttgtaggactggacgttcaaggtggcgcgatgtgtgccgcaactttatgagacgttaccagagccgcgttacccaaggacttgtggcaggcgagactgctcagcagatttgcgaggatctccgcctctgcatcccctccacaggccccttg

SEQ ID NO: 32808 - DNA, 435 bp, synthetic construct
  misc_feature 1..435: note = Description of Artificial Sequence: Synthetic coding sequence
  source 1..435: mol_type = other DNA
atggctacgtgggccctcctcctgttggcggcaatgctgctgggaaatccgggtttggtcttttcacgcctgtccccagagtactacgatctggcacgcgcccaccttagagacgaggaaaagtcctgtccgtgcttggctcaggagggaccacaaggcgatctgcttaccaagactcaggaactcggtcgggactaccgcacttgcctcactattgtgcagaagctcaagaagatggtggacaagccgacccagcggtccgtgtcgaatgcggcaacccgggtgtgtcgaaccggaagatcacgctggagagacgtgtgtagaaacttcatgcggcggtatcaaagccgcgtgactcaggggctggtggctggagaaactgcgcaacagatctgcgaagatctgcggctctgcatcccatccactggtccactg

SEQ ID NO: 32809 - DNA, 435 bp, synthetic construct
  misc_feature 1..435: note = Description of Artificial Sequence: Synthetic coding sequence
  source 1..435: mol_type = other DNA
atggccacgtgggctctgttgctcctagcagcaatgcttctcggtaatccgggtctggtgttctcaagactgtcgcctgagtattacgacctcgcacgggcccaccttagggatgaagaaaagagttgcccgtgcctggcgcaggagggtccacaaggggatctgctgaccaaaacccaggaacttgggcgcgactaccgaacttgtctgacaatcgtgcagaagctgaaaaagatggtcgacaaacccacacagcgtagtgtgtcaaacgcagccaccagagtttgccgtaccggacggtctagatggcgggatgtgtgcagaaacttcatgaggaggtaccaatccagggtaactcaggggctagtcgctggcgagacagcgcagcagatttgtgaagaccttcggctttgtataccatctaccggacctctt

SEQ ID NO: 32810 - DNA, 435 bp, synthetic construct
  misc_feature 1..435: note = Description of Artificial Sequence: Synthetic coding sequence
  source 1..435: mol_type = other DNA
atggccacctgggcactcctcctgctggccgcaatgctcttgggaaaccccggactcgttttttctagactatccccagaatactacgaccttgctagagcgcacttgcgggacgaggagaagtcttgtccgtgccttgcccaggagggacctcagggcgaccttctgaccaagacccaagaacttgggcgggactaccgcacctgtttgaccatagtgcagaagttgaagaaaatggtagacaaacccacgcaaaggtccgtgagtaatgccgctacccgggtgtgcaggactgggaggtcccgatggagagatgtgtgtaggaactttatgcgtcgataccagagcagggtcacccagggacttgtcgcgggtgagacggcccaacagatttgtgaggaccttcggttgtgcataccatcaacgggccctctc

SEQ ID NO: 32811 - DNA, 435 bp, synthetic construct
  misc_feature 1..435: note = Description of Artificial Sequence: Synthetic coding sequence
  source 1..435: mol_type = other DNA
atggcaacctgggcgctcttgcttctggctgcgatgctcctcggaaacccaggccttgttttttcccgcctgtcgccagaatactacgatctcgcgcgcgcccacctgcgggacgaagagaagtcgtgcccttgcttggcccaggaggggccgcagggcgacctcctgaccaaaacccaggaactcggtcgggattacaggacttgcctgactattgtgcaaaagctgaagaaaatggtcgacaagccgactcagcgcagcgtgtctaacgcagctacgagagtgtgccgaactgggagaagcagatggcgggatgtgtgccgcaatttcatgcggcggtaccaatcaagggtgacccagggactggtcgccggagaaaccgcccagcaaatctgtgaggacctgcgcctgtgtatcccgtccactggacccctg

SEQ ID NO: 32812 - DNA, 435 bp, synthetic construct
  misc_feature 1..435: note = Description of Artificial Sequence: Synthetic coding sequence
  source 1..435: mol_type = other DNA
atggcaacatgggctctgctgctgctggcagctatgctcctgggaaaccccgggcttgttttcagccgccttagcccagagtattacgacctggcaagagcccaccttcgagatgaagaaaaatcttgtccatgtctggcccaggaagggcctcagggagacttgttaaccaagactcaggaactgggcagggactaccggacctgcctgacaatcgtgcaaaaactgaagaaaatggttgacaagcccacccaacgctctgtgtcaaatgccgccacacgggtttgccggaccgggcgttcccgttggcgggacgtgtgccgtaatttcatgcgcagataccagtccagagtaacccagggtctcgtagcgggtgaaacagcccagcaaatctgcgaggaccttaggctatgcataccttctacaggccctctc

SEQ ID NO: 32813 - DNA, 435 bp, synthetic construct
  misc_feature 1..435: note = Description of Artificial Sequence: Synthetic coding sequence
  source 1..435: mol_type = other DNA
atggctacgtgggccctgcttctgctcgccgccatgctcctcgggaacccggggctggtgttctccagattgtcccccgagtactacgatttagccagagctcacctgcgggacgaggagaaaagttgcccatgcttggctcaggaaggcccacaaggggacctgctgactaaaacccaggagctgggaagagactacagaacctgtcttacgattgtacagaagcttaaaaaaatggtcgataaaccaacccagagatccgttagcaacgctgctactcgggtatgtcgtacgggaaggtctcgctggagggacgtgtgtcggaactttatgaggcgatatcaaagtcgggtgacacaaggcttggtcgctggcgagaccgcccagcagatctgcgaggatctgcggctctgcatccctagcactggaccactg

SEQ ID NO: 32814 - DNA, 435 bp, synthetic construct
  misc_feature 1..435: note = Description of Artificial Sequence: Synthetic coding sequence
  source 1..435: mol_type = other DNA
atggccacttgggctttgttactgttggccgcgatgttactcgggaaccccggcttggtgtttagtcggctaagtccggagtactatgacctggctagggcccacctgagagacgaggagaagtcctgcccttgccttgctcaagagggcccacagggggacctgttgactaagacacaggaactgggtcgcgactatcggacatgtctgactatcgttcaaaaacttaaaaaaatggtggacaagccaactcagcgctccgtctctaatgctgctaccagggtttgtcggaccggacgctcacggtggagagacgtttgccggaattttatgcggagatatcagtctcgggttacccagggccttgtcgctggggagactgctcagcagatctgcgaagacctgagactatgcatcccttcaacagggcccctg

SEQ ID NO: 32815 - DNA, 435 bp, synthetic construct
  misc_feature 1..435: note = Description of Artificial Sequence: Synthetic coding sequence
  source 1..435: mol_type = other DNA
atggctacctgggcccttctgctcctcgccgccatgctgctgggtaaccctggactggtgttcagtcgactgtctcctgaatattatgacctggctcgggcgcacctgcgggacgaagagaagtcctgtccatgccttgcacaggagggtccgcaaggggatttgctcacaaaaactcaggagttgggcagggattaccgcacctgtctaaccatcgtacaaaaactcaagaagatggttgacaagcccactcagaggagtgtgagtaatgccgcaacacgcgtatgccggaccggcagaagtagatggcgggacgtgtgtcgaaacttcatgcgccgctaccagtccagggtgacacaggggcttgtcgccggggagacagcacagcagatttgtgaagatctgaggctttgcatccccagcacaggcccctta

SEQ ID NO: 32816 - DNA, 435 bp, synthetic construct
  misc_feature 1..435: note = Description of Artificial Sequence: Synthetic coding sequence
  source 1..435: mol_type = other DNA
atggctacctgggccctgctcttgctggccgcgatgctcctggggaatccgggtttggtgttcagcagactctcacctgaatactacgatttggcgcgtgcccatctccgcgatgaagagaagagctgcccatgcctcgctcaggaaggaccgcagggtgaccttctcactaagacccaagagctcggacgtgattacaggacctgtctgactatcgtgcagaagctgaaaaagatggtagacaaaccaacccaaaggtcagtgtcgaacgccgctactcgcgtgtgccggaccggacgctcccgctggcgcgacgtgtgtcggaacttcatgagaagataccaatcccgcgttacgcaaggattggtcgccggagaaactgctcagcagatttgcgaggacctccggctttgtatcccctcgacgggccctctt

SEQ ID NO: 32817 - DNA, 435 bp, synthetic construct
  misc_feature 1..435: note = Description of Artificial Sequence: Synthetic coding sequence
  source 1..435: mol_type = other DNA
atggccacctgggctctactgcttcttgcagccatgctcctgggtaaccctggcctcgtattctcccggctctcacccgagtactatgacctggcccgagcgcacctgcgggacgaggaaaagagctgcccctgtttggcacaggaaggaccccagggcgaccttctaaccaagacccaggaactcggtagggactaccggacatgtctgacgatcgtccaaaagttgaagaagatggtggacaaaccaacacagcgatccgttagtaacgctgctactagggtgtgccggactggccgttctaggtggcgcgacgtctgtcgcaatttcatgaggcgataccagagccgcgtaacgcagggcttggtggcaggggagacggcacagcagatctgtgaggatttgagactgtgcatcccatccactggcccccta

SEQ ID NO: 32818 - DNA, 435 bp, synthetic construct
  misc_feature 1..435: note = Description of Artificial Sequence: Synthetic coding sequence
  source 1..435: mol_type = other DNA
atggccacttgggctctgctcctcctcgctgccatgctgctgggaaacccgggcttggttttttctcggctctccccagagtactacgacctcgcgcgggcgcatttgcgggatgaagaaaaatcctgcccttgcttggcccaagaagggccacagggagatctgctgaccaagacgcaggaactgggacgagattacagaacttgcctcaccatcgtccagaagttgaagaagatggtggacaagccgactcaacggtcggtgtccaacgccgcaacccgggtctgcaggaccggcagatcacgctggcgagatgtgtgtcgcaatttcatgcgcaggtatcaatcgcgcgtgacgcagggactggtggccggggagacggcccaacagatctgtgaggacctccgcctctgcatcccgtctaccggcccgttg

SEQ ID NO: 32819 - DNA, 435 bp, synthetic construct
  misc_feature 1..435: note = Description of Artificial Sequence: Synthetic coding sequence
  source 1..435: mol_type = other DNA
atggctacatgggctctgctgctgcttgctgcaatgttgttggggaaccccgggctggttttcagccggctgagtccggaatactatgatttggcccgagcacatctaagagacgaggaaaaatcctgtccttgcttagcacaggagggccctcagggcgatcttctgacgaaaacacaagagctgggtcgggactataggacttgcttaacaattgtccagaagctgaaaaagatggttgacaagccaactcaacgcagcgttagcaacgcagccacgagagtttgtcggactggccgctcacgttggcgtgatgtttgccgcaatttcatgcgacgctatcagtctcgggtgacgcagggccttgttgctggggaaacggcccagcagatctgcgaggacctacggctttgtattccctccaccggtcctctt

SEQ ID NO: 32820 - DNA, 435 bp, synthetic construct
  misc_feature 1..435: note = Description of Artificial Sequence: Synthetic coding sequence
  source 1..435: mol_type = other DNA
atggcaacctgggcccttcttctcttggcagcgatgctgctggggaaccccggtctggtctttagccgcctctcccccgaatactacgatcttgcgagagcacatttgagagacgaagagaagtcttgtccgtgccttgctcaggaaggccctcaaggcgatcttctgaccaagactcaagaactgggacgcgattacagaacgtgcctcacgatcgtgcaaaagctgaaaaagatggtggacaaaccaactcagcggtcagtctctaatgcagccaccagggtttgtcggactggacggagcaggtggcgagatgtgtgccgcaacttcatgagacgctaccagtcgagagttactcaaggtcttgtggcaggagagactgcccagcaaatttgtgaggacttgcggctttgtattccttcaaccggtccactt

SEQ ID NO: 32821 - DNA, 435 bp, synthetic construct
  misc_feature 1..435: note = Description of Artificial Sequence: Synthetic coding sequence
  source 1..435: mol_type = other DNA
atggcaacctgggcgcttctgctccttgctgctatgctcctgggcaacccagggctcgtattttcccgcctttcgcccgagtactacgacctggccagagcccatctgcgtgatgaagaaaaatcgtgtccttgcctggcgcaggagggcccgcaaggtgatttgttgactaagacccaagagctgggacgcgactatcgaacctgtcttaccatcgtacagaagttgaaaaagatggtcgataagcctactcaaagatcagtgagcaatgcagcaaccagagtctgccgaactggaagatcccggtggcgtgacgtgtgcaggaacttcatgaggcgttaccaaagccgggtgactcaaggacttgtggccggtgaaaccgcacagcagatttgtgaagatctccgactctgtattccatccactgggccactt

SEQ ID NO: 32822 - DNA, 435 bp, synthetic construct
  misc_feature 1..435: note = Description of Artificial Sequence: Synthetic coding sequence
  source 1..435: mol_type = other DNA
atggcaacttgggcactgctccttctcgctgccatgctgctcggcaaccctgggttggtcttttctcgattgagcccggagtactatgatctggcacgggcccatcttcgggatgaagaaaagtcttgcccatgcctggctcaggagggtccccagggcgatctgctgaccaaaactcaggaactggggcgcgattatcggacgtgcctcaccatcgtgcagaaactgaagaagatggtagataagcccacacagagatccgtatctaatgcagccacgcgcgtgtgtaggactggacggagtcgctggcgggatgtctgcagaaatttcatgcgccggtaccaaagccgcgttacgcagggactcgtggctggcgagactgcacagcagatttgcgaggatctccgactgtgtattccgagtaccggccctctc

SEQ ID NO: 32823 - DNA, 435 bp, synthetic construct
  misc_feature 1..435: note = Description of Artificial Sequence: Synthetic coding sequence
  source 1..435: mol_type = other DNA
atggcgacttgggccctgctcctactggcagcaatgctcttaggtaatccgggccttgtgtttagccgcctgtcccctgaatactacgatctagcacgtgctcacctgcgggatgaggaaaagtcatgtccatgtctggcccaggaaggacctcaaggtgatttgctcacgaagactcaggaactgggtagagattacaggacgtgcttaacgattgtgcagaaactgaaaaaaatggttgataagcctactcagaggtctgtgtcgaatgccgccacaagagtatgtcggaccggaaggagccgctggcgagatgtatgtagaaatttcatgaggcgctatcagtctcgcgttacacagggcttagtagcaggggaaactgcccaacagatatgcgaggacctgcggttgtgtatcccatcaaccggacctttg

SEQ ID NO: 32824 - DNA, 435 bp, synthetic construct
  misc_feature 1..435: note = Description of Artificial Sequence: Synthetic coding sequence
  source 1..435: mol_type = other DNA
atggccacgtgggctcttttactacttgctgcaatgctcttaggaaaccctggactcgtgttttcccgtctttcccctgagtactacgatctagctagagcacacttgcgggatgaggaaaagtcatgtccgtgcctggcccaagaaggaccgcaaggtgatctgctgaccaaaacccaggagctgggaagggactaccgcacttgcctgacaatcgtgcagaagcttaagaagatggtcgacaagcccactcaaaggtcagtgtcaaacgcggcgaccagagtttgcaggacaggaagaagcagatggcgcgatgtgtgccgcaattttatgagaagatatcaaagccgtgtcactcagggtctggttgctggagagacagcgcaacagatctgtgaggacctgagactgtgcatccctagcactgggccgctg

SEQ ID NO: 32825 - DNA, 435 bp, synthetic construct; identical to SEQ ID NO: 32812
  misc_feature 1..435: note = Description of Artificial Sequence: Synthetic coding sequence
  source 1..435: mol_type = other DNA

SEQ ID NO: 32826 - DNA, 435 bp, synthetic construct
  misc_feature 1..435: note = Description of Artificial Sequence: Synthetic coding sequence
  source 1..435: mol_type = other DNA
atggccacctgggcactcctgcttctggcggccatgctgctggggaatcctggtctggtgttttcacggctgagccctgaatactacgatcttgcacgcgcgcacctgcgcgatgaggagaagtcgtgtccgtgcctcgcacaagaaggccctcagggagatctccttaccaaaactcaagaactcggcagagactacagaacttgccttaccatcgtgcaaaaactgaagaagatggtggataaacctacccaaagatcagtctctaacgcagcaacccgtgtgtgtcgaactgggagatcaagatggcgcgatgtgtgtcggaatttcatgagacggtaccagtcgcgtgtgacccagggactggtggcaggtgagactgcccaacaaatctgcgaggaccttcgactgtgtatcccatcgaccggccccctg

SEQ ID NO: 32827 - DNA, 435 bp, synthetic construct
  misc_feature 1..435: note = Description of Artificial Sequence: Synthetic coding sequence
  source 1..435: mol_type = other DNA
atggcaacctgggcccttttgctcctggcagccatgctgctgggaaatcccggacttgtgttttcccgtctgtcgcctgaatactacgaccttgccagagcacatctgagagatgaagaaaagtcctgtccttgtctggcgcaagaaggtcctcaaggagatctgttgaccaagacccaagagttgggtagagattaccgaacctgcctcaccatcgtccagaagctgaagaagatggtggataagccaacccagcgctcggtgtcgaacgctgcgactcgcgtgtgtagaaccggaaggagccggtggcgggatgtgtgccggaactttatgcgcagataccagagccgagtcactcagggtctggtcgcaggagaaactgcacaacaaatttgtgaggacctgcggctttgtattccttcaactggtccgctg

SEQ ID NO: 32828 - DNA, 435 bp, synthetic construct
  misc_feature 1..435: note = Description of Artificial Sequence: Synthetic coding sequence
  source 1..435: mol_type = other DNA
atggccacctgggcacttttgctgcttgcagcaatgcttcttggaaatcctggccttgttttctctcgactgtccccggagtactatgatctcgcgcgcgcacacttgagggacgaagaaaagagctgtccatgtctggcccaggaaggacctcagggtgatctgcttacgaaaacccaggaactgggacgtgattacagaacgtgtttgactattgtgcaaaaactgaagaagatggtggacaagccaactcaacgatcggtatcaaacgcagcgaccagagtgtgcaggactggtcggtcgcgctggcgagatgtgtgtagaaactttatgcgccggtaccaatcccgggtgactcagggtcttgtcgcaggcgagactgctcaacagatctgcgaggatcttcgactgtgcattccttcgaccggtcctctg

SEQ ID NO: 32829 - DNA, 435 bp, synthetic construct
  misc_feature 1..435: note = Description of Artificial Sequence: Synthetic coding sequence
  source 1..435: mol_type = other DNA
atggcgacgtgggctttgctgctcctggcagcaatgctccttgggaacccaggactggtgttctctagactgagccctgagtactacgaccttgccagggcgcatctgcgggatgaagagaaaagctgtccctgcctggctcaagagggaccacagggagatctccttacaaagacacaggaattgggcagggactatcgcacttgcctcaccatcgtccagaaattgaaaaagatggttgacaaaccaacacagagaagtgtaagcaacgcagcgacaagggtatgtaggacagggagaagccgctggagggacgtttgcagaaactttatgagaaggtaccagagtcgagtcacgcaggggctggtggccggggagacggcgcaacaaatatgcgaagatctgcgcctgtgcattccaagtacaggtccactg

SEQ ID NO: 32830 - DNA, 435 bp, synthetic construct
  misc_feature 1..435: note = Description of Artificial Sequence: Synthetic coding sequence
  source 1..435: mol_type = other DNA
atggcaacttgggccctgctgttactcgcggccatgctgttgggtaaccccggcctggtcttttccaggttgtcccccgaatattacgacctggctcgggcccacctacgggatgaggaaaaatcttgtccgtgcctcgcccaggaaggaccacagggagatctcctcaccaaaacccaggaactggggagagattataggacctgcctgacaatcgtgcaaaagctgaaaaagatggtcgacaaaccaacacagcggtcagtgagcaatgccgctaccagagtgtgcaggaccgggcggagccggtggagggacgtgtgcaggaactttatgagacgctatcagtcacgtgtcactcaggggctggtcgctggcgaaaccgctcaacagatatgcgaagacctcagactgtgtatcccctctacagggcccctg

SEQ ID NO: 32831 - DNA, 435 bp, synthetic construct
  misc_feature 1..435: note = Description of Artificial Sequence: Synthetic coding sequence
  source 1..435: mol_type = other DNA
atggcaacctgggcgcttctccttctcgcagctatgctgctggggaaccctggcctggtgttttccaggttgagtcctgagtactatgatctcgcacgggcacatttgagagacgaggaaaagagctgtccctgtcttgcccaggaaggaccacagggtgaccttcttaccaagactcaagaactcgggcgcgactaccgcacctgccttacgattgttcagaaattgaaaaagatggtggataaaccgacccaacgatcagtctccaacgccgcaaccagagtgtgccgtaccggtcgttcaagatggagggatgtgtgtcgtaatttcatgcgccgctatcagtcaagagtgactcaaggactcgtcgccggtgaaactgctcagcaaatatgtgaagatctgcgtctttgcatcccatcgactggaccactg

SEQ ID NO: 32832 - DNA, 435 bp, synthetic construct
  misc_feature 1..435: note = Description of Artificial Sequence: Synthetic coding sequence
  source 1..435: mol_type = other DNA
atggcaacttgggccctattgctgctcgctgcaatgctgttaggtaaccctggcttggtgttttccaggttgtccccagagtactacgatcttgccagagcacacctccgtgatgaagagaagagctgcccctgtctagcccaagaggggccgcagggtgaccttctaactaaaacacaagagttggggagggactataggacgtgcttgactatcgtgcagaagttgaaaaagatggttgataagcccacccagcgtagcgtgtcgaatgccgctacaagagtgtgtcggaccggaagatctaggtggcgagatgtgtgccggaatttcatgagaagatatcagtctcgtgtcactcaggggctggtagcgggcgaaacggctcagcaaatatgcgaggacctgcggctgtgcattccatctacggggcctctg

SEQ ID NO: 32833 - DNA, 435 bp, synthetic construct
  misc_feature 1..435: note = Description of Artificial Sequence: Synthetic coding sequence
  source 1..435: mol_type = other DNA
atggccacttgggcccttctcctcctggcagccatgttgctggggaatcccggattggtctttagccgcctgtcccccgagtactatgacttggctcgcgcccacctccgagacgaggagaagtcatgcccttgcctggctcaggaggggcctcagggggatttgctgaccaagactcaggagttggggagggattacagaacgtgtcttacgatcgtgcagaagctgaagaaaatggtggacaagcctactcagaggagcgtgtcaaatgcagccactagggtgtgcaggaccggacgctcaaggtggagggatgtatgtagaaactttatgagaagatatcagtcacgcgtgacgcagggtttggtagctggtgagactgcacagcagatttgtgaggaccttcgactttgtattcccagtaccggtcctctt

SEQ ID NO: 32834 - DNA, 435 bp, synthetic construct
  misc_feature 1..435: note = Description of Artificial Sequence: Synthetic coding sequence
  source 1..435: mol_type = other DNA
atggccacgtgggctctgctgctcctggccgcgatgctcctggggaacccgggtttggtgttcagcagattgtcgccagagtactacgacttggctcgcgctcatctgcgcgatgaggagaagtcctgcccctgtctcgcacaggagggaccacaaggagatctgctcactaagactcaggaactgggacgcgactaccgcacttgcctgactatcgtgcagaagttgaaaaagatggtggacaagcctacgcagcggagcgtctcgaacgcggccactagagtctgccggactggacgctcgcgctggcgggacgtgtgcagaaactttatgaggcggtaccagagccgcgtgacccagggcctggtcgccggagaaaccgcccaacagatttgcgaggacctgcgcctgtgtatcccgtcgactggacctctg

SEQ ID NO: 32835 - DNA, 435 bp, synthetic construct
  misc_feature 1..435: note = Description of Artificial Sequence: Synthetic coding sequence
  source 1..435: mol_type = other DNA
atggccacttgggcgctgctgcttctggcagctatgctgctgggaaaccctgggctggtgttttcgcgcctgtcccctgagtactatgacctcgcccgcgctcatctgcgggacgaagagaaatcctgcccctgcttggcacaggaaggaccgcagggtgatcttctcaccaagacccaggaactcgggcgggactaccggacctgtcttaccatcgtccagaagctgaagaagatggttgacaagccgacgcaacgcagcgtgtcgaatgccgctacccgggtctgcagaactggacgctcacggtggcgcgacgtgtgtagaaactttatgagacgctaccaatccagagtcactcaggggctcgtggccggcgaaaccgcccagcagatttgcgaggacttgagactgtgcatcccttccaccggaccattg

SEQ ID NO: 32836 - DNA, 435 bp, synthetic construct
  misc_feature 1..435: note = Description of Artificial Sequence: Synthetic coding sequence
  source 1..435: mol_type = other DNA
atggccacgtgggcgctgctgctcctggctgcgatgctgctgggaaaccccggtttggtcttttctcgcctgagccctgagtattatgatttggcccgagcgcatttgagggatgaagagaagtcctgtccttgcctggcgcaagagggaccccaaggtgatctcctaaccaagactcaggaactggggagggactaccgcacatgcctgactattgtgcagaaactgaagaagatggtcgacaagcctacacaacgtagcgtgtctaacgctgctacgcgggtctgtcggactggcaggtccagatggcgcgatgtctgcaggaactttatgcgccggtatcagtcccgtgtgacacagggccttgtggcaggagagacagcgcagcaaatctgcgaagacctgcggctgtgcatcccctcaactggacctctg

SEQ ID NO: 32837 - DNA, 435 bp, synthetic construct
  misc_feature 1..435: note = Description of Artificial Sequence: Synthetic coding sequence
  source 1..435: mol_type = other DNA
atggcaacgtgggctctcctgctgctggcggccatgctgctgggcaatccggggctggtgttctcgcggctgtcgccggaatactatgacttggcaagggcgcacctccgcgacgaggagaagtcttgcccctgccttgctcaggaggggccacagggagatctgctgactaagacccaagaacttggtcgcgattacaggacctgtctgaccatcgtccaaaaactgaagaagatggttgataagcctacccagcgctcagtgtcgaacgcagctactcgcgtgtgtaggactggtagaagcaggtggcgggatgtgtgtagaaacttcatgcggagataccaaagccgagtgacccaggggctcgtggccggagagactgcccaacagatctgcgaggacctccggctctgcatcccgtcaacgggaccactc

SEQ ID NO: 32838 - DNA, 435 bp, synthetic construct
  misc_feature 1..435: note = Description of Artificial Sequence: Synthetic coding sequence
  source 1..435: mol_type = other DNA
atggccacctgggccctgctgctgctcgccgctatgttgcttggaaaccctggactcgtgttcagcagactgtccccggaatactatgacctcgcgcgcgcgcatcttcgcgacgaagaaaaatcgtgcccatgcttggcccaagaggggccccaaggggacctcctcacgaaaacccaggaactgggcagagactacagaacttgcctgactatcgttcaaaaactcaaaaagatggtggacaagcccacccagagatccgtctccaatgctgccactagggtgtgccggaccggacgctcgcgctggcgggacgtgtgccgcaatttcatgcgccgctaccagtccagggtgacccagggactggtggccggcgagacggcccaacagatctgtgaggatctcagactgtgtatcccttccaccgggccactt

SEQ ID NO: 32839 - DNA, 435 bp, synthetic construct
  misc_feature 1..435: note = Description of Artificial Sequence: Synthetic coding sequence
  source 1..435: mol_type = other DNA
atggccacctgggcacttctgctgttggcagccatgctgctaggaaatcctggtctcgttttctcccgcttatcccctgagtactacgatctggcccgtgcccacctgcgcgatgaggaaaaatcgtgcccgtgcctcgcacaagaaggtccccagggagatctgctgacaaaaactcaggagctgggtcgcgattatcggacatgcctcactattgtgcagaaactgaaaaagatggtcgataagccaacccaacgttcggtcagcaacgcggctacccgtgtgtgtcgcacgggtcgtagtcgctggcgcgatgtttgtaggaactttatgcgccgctatcagtcccgcgtcacgcaaggtctggtggcgggcgagacggcgcagcagatttgtgaggacctgcggttgtgcattcctagcacaggtccgtta

SEQ ID NO: 32840 - DNA, 435 bp, synthetic construct
  misc_feature 1..435: note = Description of Artificial Sequence: Synthetic coding sequence
  source 1..435: mol_type = other DNA
atggctacctgggccctcttgcttcttgccgccatgttgctcggcaacccaggcctggtgttcagcaggctctcccccgagtactacgacctagctagggcccatctacgtgacgaagagaaaagctgcccttgtttggctcaagaaggtccacaaggcgatctgctgacaaagactcaggagttggggcgggactacagaacatgcctgacaatcgtgcaaaaactcaagaaaatggtggacaagcctacgcagcgatccgtgtctaatgcggccaccagggtgtgccggacagggcggagcagatggagggacgtgtgtaggaactttatgcgtcgctaccagagccgcgtgacccaaggattggttgcaggagagacggcacagcagatctgcgaggatctaagactgtgtatccctagcaccggcccactg

SEQ ID NO: 32841 - DNA, 435 bp, synthetic construct
  misc_feature 1..435: note = Description of Artificial Sequence: Synthetic coding sequence
  source 1..435: mol_type = other DNA
atggccacatgggctttgcttctccttgccgctatgcttctggggaatccggggttggtgttctctagactatcgcctgagtactacgatctggcaagagcccacttgcgagatgaagagaaatcatgcccttgtctggcccaggagggtcctcagggtgatttactaaccaaaacccaggaactgggacgagactataggacttgtctgaccatagtgcagaaactgaaaaaaatggtggacaaaccgacgcagcgttccgtaagtaatgccgccactcgggtttgtaggaccggcagatccagatggcgggacgtctgcaggaatttcatgcggcgataccagtcccgggtgacccaaggtttggtagcgggagagactgcacagcagatatgcgaagacttgcggctctgtataccgagtaccgggcccctg

SEQ ID NO: 32842 - DNA, 435 bp, synthetic construct
  misc_feature 1..435: note = Description of Artificial Sequence: Synthetic coding sequence
  source 1..435: mol_type = other DNA
atggcaacttgggcattgctgctgttggcagccatgctcctggggaatcctgggctggtgtttagccgtctgtcacccgaatactatgatcttgcacgggctcatcttcgcgatgaggaaaaatcctgtccttgcctggcgcaagaagggcctcagggcgatctgcttaccaagactcaagaacttggtcgagactacaggacttgcctgacgattgtgcagaagctgaagaagatggtggataaaccaactcaaagatcggttagcaatgcagcaacgcgagtctgtcgcactggacgatcaaggtggagagatgtttgtagaaactttatgaggcggtaccagagcagagtcacccaaggtttggtggcaggggaaactgcccaacagatttgcgaggatcttcgcctttgtatcccttctaccggtccactt

SEQ ID NO: 32843 - DNA, 435 bp, synthetic construct
  misc_feature 1..435: note = Description of Artificial Sequence: Synthetic coding sequence
  source 1..435: mol_type = other DNA
atggcaacttgggctcttttacttcttgcagcaatgttactaggtaatccaggacttgttttcagtcgtttaagtccagaatattacgatttagcacgtgctcacttaagagatgaagaaaaatcgtgtccatgtttagctcaagaaggaccacaaggagatttattaactaagacacaagaactaggacgagattatagaacgtgtttaactattgttcaaaagttaaaaaagatggtagataaaccaacacaaagaagtgtaagtaatgctgctactcgtgtttgtcgaacaggaagatccagatggagagatgtttgtagaaactttatgagaagatatcaaagtcgtgttactcaaggacttgtagctggggaaacagcacaacaaatctgtgaagatttaaggctttgtattccatcaactggaccactt

SEQ ID NO: 32844 - DNA, 435 bp, synthetic construct
  misc_feature 1..435: note = Description of Artificial Sequence: Synthetic coding sequence
  source 1..435: mol_type = other DNA
atggcgacttgggctctgctccttctggcagcgatgttgttgggtaatccgggcctggtgtttagccgcctctccccagaatactacgacctcgccagagcccatctgagggacgaggaaaagtcgtgcccctgcctggcccaggaaggaccccaaggagatctgctcactaagactcaggagcttggacgcgactaccggacctgcctgactatcgtccagaaactgaagaagatggtcgataaaccgacccagagatcggtgtccaacgctgcaacccgggtgtgtcggactggccgaagccgctggagagatgtgtgtcgcaacttcatgaggagataccagagccgcgtgacccagggactcgttgcaggggagactgcacaacagatctgcgaggatcttcgcctctgtataccgtccaccgggcccctg

SEQ ID NO: 32845 - DNA, 435 bp, synthetic construct
  misc_feature 1..435: note = Description of Artificial Sequence: Synthetic coding sequence
  source 1..435: mol_type = other DNA
atggccacttgggcattactcctcctggcagccatgctgctcggtaacccaggactggtgttctctcggctgtccccagaatactacgaccttgcaagggcccatctgagagatgaagagaaaagctgtccatgtttagcccaggaaggcccgcagggggacctactaacgaaaacccaggagctgggtcgcgactatcgaacctgtctgaccatcgtccagaaactgaaaaaaatggtggacaaacccacacagaggtctgtcagtaatgccgctacacgtgtttgcagaaccggccgctcgagatggagggacgtgtgtagaaacttcatgcgtaggtaccagtcgagggttacgcagggcttggtcgcaggagaaactgcgcaacagatatgtgaggaccttagactgtgcattcccagcacgggtcccctc

SEQ ID NO: 32846 - DNA, 435 bp, synthetic construct
  misc_feature 1..435: note = Description of Artificial Sequence: Synthetic coding sequence
  source 1..435: mol_type = other DNA
atggccacatgggctctccttctgctggctgccatgttgctaggcaacccaggcttggtcttctcccgactgagtcctgagtattatgatctggccagagctcacttaagggacgaagagaaatcatgcccctgcctagcccaggagggtccacaaggggacctgctaaccaagacccaggaactgggccgagattaccggacatgtctaacgatagttcagaagctgaagaaaatggtggacaagcccactcagcggtctgtctcgaacgcggccacacgcgtgtgtagaaccggtaggtctaggtggagagacgtgtgccgaaactttatgcggaggtatcagagccgtgttacgcagggcctcgtcgccggcgagaccgcacagcaaatttgtgaagacctaaggctttgtatcccatcaaccggacccctg

SEQ ID NO: 32847 - DNA, 435 bp, synthetic construct
  misc_feature 1..435: note = Description of Artificial Sequence: Synthetic coding sequence
  source 1..435: mol_type = other DNA
atggctacctgggctctgcttctgctcgcagcaatgcttctcgggaatcctgggttagttttctctcgtttgagccccgagtactacgatttagccagagcacacctcagggacgaggagaagagttgtccttgcctcgcccaggaaggaccacagggagatctactcacaaagacccaggaactaggtcgcgactacagaacatgtttgaccattgtccaaaaacttaagaaaatggtagataagcccactcagaggtctgtttctaacgcggcaacacgagtgtgccgtaccggccggagtcgctggagggacgtgtgccgaaattttatgcgccgctatcagtctcgggtgacacaagggttggtggccggcgaaacagctcagcaaatctgtgaagatctccgactttgtatacccagcaccggcccactg

SEQ ID NO: 32848 - DNA, 435 bp, synthetic construct
  misc_feature 1..435: note = Description of Artificial Sequence: Synthetic coding sequence
  source 1..435: mol_type = other DNA
atggctacttgggccctgctcctgctggccgccatgctactgggtaaccccggactggtcttttcccgacttagccccgaatattacgatcttgcccgggctcaccttcgggacgaggagaaatcctgcccatgccttgcccaggagggcccccagggcgatctattgactaagacacaggagttgggtagggactaccgcacttgcttgactatcgtccagaagctgaagaagatggtcgataagccgacacagaggtctgtttcaaatgccgccactcgagtgtgcagaacagggcgcagccggtggagagacgtctgcagaaatttcatgcggcgttaccaatctcgagtcacccagggattggtagcgggcgaaaccgctcaacagatttgtgaggatctcaggctgtgcatcccgtctactggaccgctg

SEQ ID NO: 32849 - DNA, 435 bp, synthetic construct
  misc_feature 1..435: note = Description of Artificial Sequence: Synthetic coding sequence
  source 1..435: mol_type = other DNA
atggccacctgggcgctgttactgctggccgctatgttgctcggcaaccccggtctggtgttttcacgcctctcccctgagtactacgacttggccagagctcacttgcgggatgaggagaagtcctgcccgtgtctggcacaggaaggcccacaaggcgacctgttgacgaagacacaggagctgggccgagactatcgtacgtgcttgaccattgtgcagaaacttaaaaaaatggttgataaacctacacaaaggtctgtgagcaacgcggctactcgcgtgtgccgaaccggtagatcaaggtggcgagacgtgtgtcgtaactttatgaggaggtatcagtctcgtgttacacaaggacttgttgccggggaaaccgcacagcagatctgcgaggatttgagactctgtatcccgagcactggacctttg

SEQ ID NO: 32850 - DNA, 435 bp, synthetic construct
  misc_feature 1..435: note = Description of Artificial Sequence: Synthetic coding sequence
  source 1..435: mol_type = other DNA
atggcaacctgggctctcctcctgttggccgctatgctgctgggaaaccccggcctcgttttctccagattgtccccggaatactacgacttggcccgcgcgcacctcagggatgaagagaagtcgtgcccgtgcctggctcaggaaggacctcagggggatcttctcactaaaactcaggaactgggcagggactatcggacttgtctcaccatcgtgcagaagttgaagaagatggtcgataaaccaacccaacgtagcgtgtccaatgcggcgacgcgcgtatgccgcaccggaagaagccgctggcgggacgtctgccggaactttatgcgtagataccagtcacgggtgacccaaggactggtggccggcgagactgcccagcaaatctgcgaggacctgcggctgtgcatcccgagtacgggaccgctg

SEQ ID NO: 32851 - DNA, 435 bp, synthetic construct
  misc_feature 1..435: note = Description of Artificial Sequence: Synthetic coding sequence
  source 1..435: mol_type = other DNA
atggcgacttgggctctgctgctgctcgccgccatgcttctcggcaacccgggactcgttttctcgcgcctgtctccggaatactacgatctcgcacgcgcccacctgcgggacgaagagaaatcatgcccatgcctggcacaggaaggccctcagggcgatctgttgactaagactcaagagctgggacgggactacagaacttgcctcaccattgtccagaaattgaagaagatggtggataagccaacccagcggtccgtgtcgaatgctgccactagagtgtgccggaccgggaggtcgcgttggcgagacgtctgcagaaacttcatgcgacggtaccagagccgcgtgacccagggactcgtggcgggagaaaccgcacagcaaatctgcgaagatctccgcctgtgcatcccgtcgaccggcccactg

SEQ ID NO: 32852 - DNA, 435 bp, synthetic construct
  misc_feature 1..435: note = Description of Artificial Sequence: Synthetic coding sequence
  source 1..435: mol_type = other DNA
atggcaacctgggcgctgctcctcctcgctgccatgctcctaggaaaccccggccttgtattcagtagattgagccctgagtattatgatcttgctcgggcccaccttcgcgacgaagagaaatcctgtccttgcctcgcccaggaagggccacagggagacttgctaactaaaacccaggagctggggagggactaccgcacatgtctcactattgtacagaagttaaagaaaatggtggataagccgactcagagaagtgttagtaacgcggcaacacgcgtgtgtaggaccgggagatcccgttggcgggatgtttgtcgaaattttatgagacgctatcagagccgagtgacacaaggcctggtcgctggggagaccgcccaacagatttgcgaagatttgcgtctttgtatcccctccactggaccactg

SEQ ID NO: 32853 - DNA, 435 bp, synthetic construct
  misc_feature 1..435: note = Description of Artificial Sequence: Synthetic coding sequence
  source 1..435: mol_type = other DNA
atggcaacctgggcactgctgctgctcgcagcaatgttactggggaaccccggactggtgtttagtagactgagcccggaatattatgacctcgcccgtgcccaccttcgggacgaagaaaaatcttgtccctgcttggcacaagaagggccacagggagacctactgacaaaaactcaagaactgggccgggactacagaacatgcttgacaatcgtgcagaaactgaaaaaaatggtggataaacccacacaaagaagcgtcagtaatgccgctacacgagtctgtcgcacagggcgaagtcgctggagagacgtctgtagaaactttatgaggaggtaccagagcagagttacccaaggtctggtggcgggggagacagctcaacagatctgcgaggacttacgtctctgcattcctagcaccggcccctta

SEQ ID NO: 32854 - DNA, 435 bp, synthetic construct
  misc_feature 1..435: note = Description of Artificial Sequence: Synthetic coding sequence
  source 1..435: mol_type = other DNA
atggctacttgggcccttctcttgctcgccgcaatgctcctggggaatccgggccttgtcttcagtcggctcagccctgagtactacgatctagcacgagctcatctgagagatgaagagaagtcatgcccttgccttgctcaagagggtccccagggcgacctgctcaccaaaacccaggagctgggtcgggattatcgcacctgtctgaccattgtccagaaactcaagaaaatggttgacaagcctacccagcgcagcgtgtctaacgcagccactcgggtgtgccggacaggacgctcgcggtggcgcgatgtatgtcggaacttcatgcgcagatatcagtcccgggttacgcagggactggtggcaggtgagacggcgcagcagatttgtgaagacttgagactatgtatccccagcactggcccactg

SEQ ID NO: 32855 - DNA, 435 bp, synthetic construct
  misc_feature 1..435: note = Description of Artificial Sequence: Synthetic coding sequence
  source 1..435: mol_type = other DNA
atggccacctgggcactgctcttgctcgccgcgatgctcctggggaaccccgggctggtcttttcaagactgagcccagagtattacgatctggcaagggcccatctgagagatgaagagaagagctgcccatgcctggctcaagagggcccgcagggggacctgctcaccaaaacccaggaactgggacgggattaccgcacctgcctgaccatcgtgcagaaattgaagaagatggtggacaaacctacccagaggtccgtgtcgaatgccgcaacccgcgtgtgccggactggtagaagcagatggcgcgacgtgtgccgcaacttcatgcgccgctaccagtcccgcgtcacccagggactggtggccggggaaaccgcacaacaaatttgcgaggacctgcgcctctgcatcccgtcaactggtcctctg

SEQ ID NO: 32856 - DNA, 435 bp, synthetic construct
  misc_feature 1..435: note = Description of Artificial Sequence: Synthetic coding sequence
  source 1..435: mol_type = other DNA
atggctacatgggctttgcttctacttgcggcaatgcttcttggaaaccccgggttagtcttttctcgtttatccccggagtattacgatttagcgcgtgctcatttgcgtgatgaagagaagtcttgcccgtgtttggctcaagaaggacctcaaggcgatctcttaacgaagacgcaagaattgggccgcgactatcgaacatgcttaacgattgtccaaaagttaaaaaagatggtcgacaagcctacacaaagatctgtcagtaatgcagcaacacgcgtttgcagaacggggcgttcgagatggcgcgacgtatgccgcaattttatgcgacgatatcagagccgggtaacccagggcctggtggcgggggagacagcccaacagatatgcgaagaccttcgcttgtgcatcccttccacaggacccctt

SEQ ID NO: 32857 - DNA, 435 bp, synthetic construct
  misc_feature 1..435: note = Description of Artificial Sequence: Synthetic coding sequence
  source 1..435: mol_type = other DNA
atggctacatgggcactgctcctgctcgcagcgatgttgcttggtaatccaggcctggtttttagccgactgtcgccggagtattatgatctggcccgtgcccatttacgagacgaagaaaaatcttgtccgtgtttggctcaggaaggcccacagggagacttacttaccaagactcaagaactaggacgagattataggacttgcctcacaatagttcaaaaacttaagaaaatggtcgataaacctacgcagcgttcagtttccaatgcagcgacacgtgtttgtagaaccggacggtctcgttggcgcgatgtatgccgtaatttcatgagaagatatcagagcagggtgacacagggtctggttgcaggtgagacggctcaacagatctgcgaggatctgcgtctgtgcatcccgtctacaggaccactt

SEQ ID NO: 32858 - DNA, 435 bp, synthetic construct
  misc_feature 1..435: note = Description of Artificial Sequence: Synthetic coding sequence
  source 1..435: mol_type = other DNA
atggctacctgggcgcttctgcttctggccgcaatgttgctggggaaccctggtctggtatttagtcggctgtcgccagaatactacgaccttgcccgggctcacctgcgcgatgaggagaagtcctgtccctgcctggctcaggagggcccgcagggcgacctcctgaccaagactcaggaacttggaagggattatagaacctgtcttactattgtgcaaaaacttaagaaaatggtggataagcccacgcaaagatctgtgtccaatgcagccaccagggtgtgccgaactggcagaagccggtggcgtgacgtctgtagaaacttcatgcgcaggtaccagagcagagtcacccaaggacttgtcgcaggcgaaactgcacaacagatctgcgaagatctgcgcctgtgtataccttcaaccggacctctc

SEQ ID NO: 32859 - DNA, 435 bp, synthetic construct
  misc_feature 1..435: note = Description of Artificial Sequence: Synthetic coding sequence
  source 1..435: mol_type = other DNA
atggccacctgggccctgctgttgctggccgctatgctcttggggaacccgggactggtgttctcccggctgtcgcccgaatactatgatcttgcgagagcacacttgcgagacgaagagaagtcgtgcccatgccttgcgcaggaaggaccgcaaggtgacctgctcaccaagacccaggagctggggagggactaccgcacctgcttgactatcgtccagaaactgaagaaaatggtagataagcctacccaacggagcgtctcaaacgccgcgactcgagtatgcagaaccggcagatctcgctggcgcgacgtgtgtcggaatttcatgcggcgataccaatcacgcgtgactcaaggactggtggcgggggagacggcccagcagatctgtgaagatctccgtctgtgcattccgtcgactggacctctc

SEQ ID NO: 32860 - DNA, 435 bp, synthetic construct
  misc_feature 1..435: note = Description of Artificial Sequence: Synthetic coding sequence
  source 1..435: mol_type = other DNA
atggcaacgtgggcacttttgttgctcgcagcaatgctcctcggaaacccaggtcttgtcttttcccgcctttcacctgaatactatgacctggcgcgcgcccatctgcgcgacgaagagaaatcgtgcccgtgtcttgcacaagaaggacctcaaggcgatctcctgactaagacccaagaacttgggagggactaccgcacctgtctgactatagttcaaaagctgaaaaagatggtcgataagcccacccaaagatctgtgtcgaacgccgcaactagggtctgtcgaaccgggaggagcagatggcgggatgtctgtagaaatttcatgaggaggtaccagagtcgtgtgactcaaggtttggtggcgggggaaacggcgcagcagatttgtgaagatttgaggctttgcattccatccaccggtcctctg

SEQ ID NO: 32861 - DNA, 435 bp, synthetic construct
  misc_feature 1..435: note = Description of Artificial Sequence: Synthetic coding sequence
  source 1..435: mol_type = other DNA
atggcaacctgggcactgctgctgctggcagccatgcttctgggaaacccaggtctggtgttttcacgtcttagccccgaatactacgatttggcaagagcacacctgagggatgaagaaaagtcgtgcccatgtctcgcacaagaaggaccccaaggtgacctgctcactaagacccaagaacttgggagggactaccgcacgtgtcttacgattgtccagaagctgaagaagatggtggacaaacccactcaacggtcggtgtccaacgccgcaactagagtgtgcaggaccggaaggtcgaggtggcgagacgtgtgtagaaacttcatgcggagataccaatcgcgggtcacccaaggactggtggcgggagaaactgcgcagcaaatatgtgaggatcttagactctgcattccttccaccggtccactt

SEQ ID NO: 32862 - DNA, 435 bp, synthetic construct
  misc_feature 1..435: note = Description of Artificial Sequence: Synthetic coding sequence
  source 1..435: mol_type = other DNA
atggcaacctgggcattgctccttcttgcagcaatgcttcttggaaatcccggcctggttttttcccgactgtcccctgaatactacgatctggcacgagcacatttgagggatgaagaaaagtcttgtccatgccttgcgcaggagggtcctcagggcgatctcctgactaagacccaagaactggggcgggattaccgtacttgtctgaccatcgtgcaaaagctcaaaaagatggtcgataagccaactcaacgcagcgtgtccaatgcagccacgcgcgtgtgtcgcaccgggcgcagcaggtggagggatgtgtgccgtaactttatgagaagataccagtctcgtgtgactcaaggacttgtcgccggcgaaaccgcgcaacaaatatgtgaagatctccggctttgtattccgtcgactggacctctt

SEQ ID NO: 32863 - DNA, 435 bp, synthetic construct
  misc_feature 1..435: note = Description of Artificial Sequence: Synthetic coding sequence
  source 1..435: mol_type = other DNA
atggcgacatgggcccttctgttattggcggctatgctcctcggcaatcccggcctggtcttttcaaggttgtccccagaatactatgacttggcacgcgctcacttgcgggatgaggaaaagtcatgcccttgcttggcccaggagggtcctcagggcgacttgctaaccaaaacgcaagaactcggccgagattacaggacgtgtcttactatcgttcagaagctgaaaaaaatggtggacaagccgacacagcgatcagtttccaatgcggcaactcgggtgtgccgtacaggcagaagtcgctggcgagacgtgtgcagaaactttatgagaagataccagtccagagtcactcaaggactcgtcgctggcgagacagcccagcagatatgtgaggatctgcggctgtgcataccatccactggccccctg

SEQ ID NO: 32864 - DNA, 435 bp, synthetic construct
  misc_feature 1..435: note = Description of Artificial Sequence: Synthetic coding sequence
  source 1..435: mol_type = other DNA
atggctacctgggcactattgctgttggcagctatgctgcttggtaaccccggcctggtattctcccgcctgagccccgaatactatgacctggcccgcgctcacctgagggatgaggagaagtcttgtccttgtctggcccaggagggcccccagggcgatttgctcaccaagacccaagagcttggccgcgactaccgcacctgcctgacgattgtccagaagctcaagaaaatggtagacaagcccacccaacgctccgtcagcaacgccgctacccgggtgtgtcgcacgggacgctcccgttggcgggatgtctgcaggaacttcatgcgtcgttaccagagccgagtcacccaaggtctggtggccggagagaccgcccagcagatatgtgaagatctccgcctgtgcatcccctcgaccggtccgctg

SEQ ID NO: 32865 - DNA, 435 bp, synthetic construct
  misc_feature 1..435: note = Description of Artificial Sequence: Synthetic coding sequence
  source 1..435: mol_type = other DNA
atggccacttgggcactcctgctgcttgctgccatgctgcttggtaatccgggcctggtgttttcacgactcagccccgaatactacgatctggctagagcacatctccgcgacgaggaaaaatcctgcccatgtctggcacaggagggacctcaaggagatttgctcacgaaaacccaggagttgggtagagattataggacttgtctcactattgttcaaaaacttaagaaaatggtcgataagccgactcaacgttcagtttcgaacgcagcgacgagggtgtgtagaacgggaagatcccgctggcgagacgtgtgtaggaacttcatgagaagatatcagtcacgggtgacccaaggattggtcgcaggtgaaaccgcccaacagatctgcgaggatcttcggctgtgtattccctcgactgggcccctc

SEQ ID NO: 32866 - DNA, 435 bp, synthetic construct
  misc_feature 1..435: note = Description of Artificial Sequence: Synthetic coding sequence
  source 1..435: mol_type = other DNA
atggcaacctgggcactgttgcttctggccgctatgttgcttggaaacccgggactggtgttctcccgcttgtcaccagagtactatgatcttgcacgcgcacatttgcgtgacgaggaaaagtcgtgcccgtgtctcgcacaagaaggaccacaaggcgatctgcttaccaaaactcaggagcttggtagagactaccggacctgtctgactattgtgcaaaaacttaagaagatggtcgataagccaacccagaggagcgtgtccaacgccgcgactcgcgtgtgtaggactggtcggagccgctggagagatgtgtgtagaaactttatgagacgttatcaatcgcgggtgactcagggtcttgttgctggcgaaaccgcccagcagatttgcgaagatctgcgtctttgtattccttccaccggtcccctg

SEQ ID NO: 32867 - DNA, 435 bp, synthetic construct
  misc_feature 1..435: note = Description of Artificial Sequence: Synthetic coding sequence
  source 1..435: mol_type = other DNA
atggcgacgtgggcgttactattattagcggcgatgctattaggtaatccgggtttagttttttcgcgtctatcgccggaatattatgatctagcgcgagcgcatttacgagatgaagaaaaatcgtgtccgtgtctagcgcaagaaggtccgcaaggtgatttactaacgaaaacgcaagaattaggtcgtgattatcgaacgtgtttaacgatagtacaaaaattaaaaaaaatggtagataaaccgacgcaacgttcggtttcgaatgcggcgacgcgtgtttgtcgaacgggtcgttcgcgttggcgtgatgtttgtcgaaattttatgcgtcgttatcaatcgcgtgtaacgcaaggtttagtagcgggtgaaacggcgcaacaaatatgtgaagatttacgtttatgtataccgtcgacgggtccgtta

SEQ ID NO: 32868 - DNA, 435 bp, synthetic construct
  misc_feature 1..435: note = Description of Artificial Sequence: Synthetic coding sequence
  source 1..435: mol_type = other DNA
atggcaacctgggctcttctgctgctggccgctatgctgttaggaaacccaggactggtgttctccagactcagccctgagtactatgacctggcaagagctcatctacgcgacgaagagaaaagttgtccatgtctggcacaggaaggcccacagggcgaccttctcacaaaaactcaagagctaggacgcgattacaggacctgcttgacgatcgtgcaaaagctgaagaagatggtcgataagccgactcagcggtctgtgagcaatgctgccacgagagtgtgtaggactggcagaagtcgatggcgggacgtatgcagaaacttcatgcggaggtaccaaagtcgagtcacccagggcctagtggccggtgagactgcacagcaaatatgtgaagatctgcgactttgtattcccagcactggtccactg

SEQ ID NO: 32869 - DNA, 435 bp, synthetic construct
  misc_feature 1..435: note = Description of Artificial Sequence: Synthetic coding sequence
  source 1..435: mol_type = other DNA
atggccacctgggcgctcctgctgctggctgccatgctgctcggaaatccaggactcgtgttttctcggctgtcgcctgaatactatgatctggcaagagcgcacttgcgggacgaggaaaagagctgcccttgtctcgcacaagagggcccgcaaggggaccttttgactaaaacccaagaactgggacgggattaccggacctgtctcactatcgtgcagaagctgaagaagatggtcgacaaacctactcagcgctccgtgtcgaatgccgccacccgcgtctgtaggactggcagatcccgctggcgcgacgtgtgccgcaatttcatgagacggtaccagagccgcgtgactcagggcctggtggcaggggaaactgcgcagcaaatctgcgaagatctgcggctgtgcatcccgtccacgggtccactg

SEQ ID NO: 32870 - DNA, 435 bp, synthetic construct
  misc_feature 1..435: note = Description of Artificial Sequence: Synthetic coding sequence
  source 1..435: mol_type = other DNA
atggctacgtgggccctgctacttctagcagcgatgttgctgggtaacccgggccttgtgttcagccgcttatcccctgagtactatgacttggcccgcgcccatttgagggatgaggagaaaagttgtccttgtctggcccaggagggtccccaaggtgacctactgaccaaaactcaggaattaggtcgggattatcggacctgcctcactattgtccagaagctgaagaagatggtggacaaacctacacagagatccgtgagtaatgctgcaacgagagtatgtcggaccggtaggagccgctggagggacgtgtgtagaaactttatgagacgctatcagtcccgcgtcacgcaggggctggtggcgggggaaacggcccagcagatctgtgaggacctgcgtctttgtattccatccactggtcctctt

SEQ ID NO: 32871 - DNA, 435 bp, synthetic construct
  misc_feature 1..435: note = Description of Artificial Sequence: Synthetic coding sequence
  source 1..435: mol_type = other DNA
atggccacttgggcattgctcctgctcgccgccatgcttttgggcaatccaggactcgtgttttctagactgagcccagagtactacgatctggctagggcacacctgcgcgacgaagagaaaagctgtccctgcctcgcgcaggagggcccccaaggcgatctcttaaccaagactcaggagctcgggcgagattataggacatgcttgactatcgtccaaaaattgaagaaaatggttgacaagcccacacagcgaagcgtatcaaacgctgcgaccagagtgtgtaggacaggccgttcacgatggcgcgacgtatgtaggaacttcatgaggcgataccagtctagagtcactcaggggcttgtcgcgggtgaaaccgctcagcagatctgtgaagatctgcgactgtgcatacccagcaccggccccctg

SEQ ID NO: 32872 - DNA, 435 bp, synthetic construct
  misc_feature 1..435: note = Description of Artificial Sequence: Synthetic coding sequence
  source 1..435: mol_type = other DNA
atggccacatgggccctgctgctgttagctgccatgctccttggaaaccccggactggtgttctcaaggctgagtccagaatattatgatctggccagagcacatctgagggatgaggaaaaatcttgcccatgcctagctcaagaagggccccagggggatctactgacgaaaacacaggaactcggaagagattataggacttgtctcactatcgtgcagaaactgaaaaaaatggtggacaaacccacacagcggtctgtcagtaacgccgcgacacgcgtctgccggactggaaggtctcgctggagagatgtatgcagaaacttcatgaggcggtatcagagtagggtgactcaggggttggtggccggagaaacagcccagcagatctgtgaagatctccggctatgcatcccaagtactgggcctcta

SEQ ID NO: 32873 - DNA, 435 bp, synthetic construct
  misc_feature 1..435: note = Description of Artificial Sequence: Synthetic coding sequence
  source 1..435: mol_type = other DNA
atggctacatgggccctactgctgctcgccgctatgctcctagggaatcccggcctggtgttttctcggttaagccccgagtattatgatttagcccgggcccatctgcgtgacgaagaaaaaagctgtccatgtctggcccaggagggaccacagggcgatctgctgacaaagacacaggagcttgggagggattaccggacttgcttgaccatagtgcaaaagttaaaaaaaatggtggacaaaccaactcagaggtcagtgagcaatgccgctaccagagtttgtaggacaggcagatccaggtggagagacgtttgccgcaatttcatgcgcaggtaccagagccgagtgacccagggcctggtggcaggtgaaacagctcagcagatttgtgaggacctcagactatgcatcccatcaacagggccactc

SEQ ID NO: 32874 - DNA, 435 bp, synthetic construct
  misc_feature 1..435: note = Description of Artificial Sequence: Synthetic coding sequence
  source 1..435: mol_type = other DNA
atggcgacgtgggccttgcttcttcttgccgcaatgctgcttggtaatccaggactggtgttcagtagattgtcacctgaatactatgacttggctcgggcccacttgagggatgaggagaaatcgtgcccctgccttgctcaggagggtccacaaggtgatctgctcacaaaaacccaggaattagggagggattacagaacttgccttaccatagtgcagaagctaaagaagatggtcgataagcctacacagaggagtgtgtcgaacgctgccactagggtttgtcgcaccggtcgaagcaggtggcgtgatgtttgtcgtaatttcatgcggaggtatcaatctcgagttacgcaaggactggttgctggtgaaactgcacaacagatttgcgaagacctgagattgtgtatcccatctacaggtcccctc

SEQ ID NO: 32875 - DNA, 435 bp, synthetic construct
  misc_feature 1..435: note = Description of Artificial Sequence: Synthetic coding sequence
  source 1..435: mol_type = other DNA
atggccacttgggcccttctcctcttggcggctatgttgctcggaaatcctggcctcgtgttttctcgactttcgcctgagtactacgacctggcccgggcccaccttagagatgaagaaaaatcatgcccatgtctcgcacaggagggcccgcagggcgacctgctgactaaaacgcaggaactgggacgagattacagaacctgcctcaccatcgtccagaagctgaagaagatggtggacaagcccacccagcggtctgttagtaacgcggctacgcgcgtgtgccgtaccgggcgcagcaggtggcgcgatgtgtgccgcaacttcatgcggagatatcaatcccgagtcacgcagggcctggtggccggagaaaccgcgcaacaaatctgcgaggacctgcgcttgtgtattccgtcaaccggtccgctg

SEQ ID NO: 32876 - DNA, 225 bp, synthetic construct
  misc_feature 1..225: note = Description of Artificial Sequence: Synthetic coding sequence
  source 1..225: mol_type = other DNA
atgggccgagattacaggacctgcctgacaattgtgcagaagttaaagaaaatggtggataagcctactcagcgcagcgtctcaaatgccgccaccagggtctgcagaactgggagatcaaggtggcgagatgtgtgccgtaactttatgcgtcgatatcagtctcgagtgactcagggcctcgttgccggggagactgcccaacagatatgtgaagatctaaga

SEQ ID NO: 32877 - DNA, 225 bp, synthetic construct
  misc_feature 1..225: note = Description of Artificial Sequence: Synthetic coding sequence
  source 1..225: mol_type = other DNA
atgggtcgggattaccgcacctgcctgaccatcgtgcaaaagctgaaaaagatggtggacaagcctacccagcgcagcgtgtcaaacgccgcgacccgcgtgtgtaggacgggacgatcgagatggagagatgtgtgtagaaacttcatgaggcggtaccagtcaagagtgactcagggattggtcgcaggtgagactgcgcaacagatctgcgaagatctccga

SEQ ID NO: 32878 - DNA, 225 bp, synthetic construct
  misc_feature 1..225: note = Description of Artificial Sequence: Synthetic coding sequence
  source 1..225: mol_type = other DNA
atgggacgggactacagaacgtgcctgaccatcgtgcagaagctcaaaaagatggttgataagccgacgcaaaggagcgtgtcaaatgccgcgaccagagtgtgtcgcaccggtcgttcgcgatggagggatgtctgcagaaacttcatgcgccgataccaatcccgggtgactcagggactggtagcgggcgaaactgcacagcagatctgcgaggaccttaga

SEQ ID NO: 32879 - DNA, 225 bp, synthetic construct
  misc_feature 1..225: note = Description of Artificial Sequence: Synthetic coding sequence
  source 1..225: mol_type = other DNA
atggggcgcgactaccgcacttgtctcaccatcgtgcagaaactcaagaaaatggtggacaagccgacccagcggtcggtgtcaaacgccgccacccgcgtctgtcgcactggtcgctcccgctggcgcgacgtgtgccgtaatttcatgcggagataccagtcgagggtcactcaaggactggtggcgggtgagactgcgcagcagatctgcgaggatttgcgc

SEQ ID NO: 32880 - DNA, 225 bp, synthetic construct
  misc_feature 1..225: note = Description of Artificial Sequence: Synthetic coding sequence
  source 1..225: mol_type = other DNA
atggggcgcgactaccggacctgcttgactattgtgcagaagttgaagaaaatggtggataagcctacccaacgctccgtctccaacgcagccactcgcgtgtgtcgcaccggacgttcaagatggcgggatgtctgtaggaactttatgcggcgataccagtccagagtgacccaaggtcttgtggcaggagagactgcccagcagatttgcgaggatctcagg

SEQ ID NO: 32881 - DNA, 225 bp, synthetic construct
  misc_feature 1..225: note = Description of Artificial Sequence: Synthetic coding sequence
  source 1..225: mol_type = other DNA
atgggccgggattataggacatgtctcaccatcgtgcagaaactgaagaaaatggttgacaagcccacgcagcgcagtgtatcaaacgccgcaacaagagtctgtcggacaggacgaagtagatggagggatgtgtgccggaacttcatgcgtcgataccaatctagagtgacccaggggttggtggccggcgaaacggcccagcagatttgcgaggacttgaga

SEQ ID NO: 32882 - DNA, 225 bp, synthetic construct
  misc_feature 1..225: note = Description of Artificial Sequence: Synthetic coding sequence
  source 1..225: mol_type = other DNA
atggggcgggattaccggacctgtctgaccatcgtgcaaaaacttaagaagatggtggataagcctacgcaaagatcagtttccaatgcggcaacccgcgtgtgtcggactggcagaagcagatggagagatgtctgccggaactttatgagacggtaccagtcacgggtgactcagggactcgtcgcaggtgagactgcacaacagatttgtgaagatctgaga

SEQ ID NO: 32883 - DNA, 225 bp, synthetic construct
  misc_feature 1..225: note = Description of Artificial Sequence: Synthetic coding sequence
  source 1..225: mol_type = other DNA
atgggaagagactaccggacctgccttacgatcgtgcagaagctgaaaaagatggtggataagcccactcagagaagcgtctccaacgcagcgacgcgggtgtgccgcaccggacgatcgcgctggagagacgtctgccgcaatttcatgagacggtaccaatcacgggtcactcagggactggtggccggagagactgcccagcagatctgcgaagacctccgg

SEQ ID NO: 32884 - DNA, 225 bp, synthetic construct
  misc_feature 1..225: note = Description of Artificial Sequence: Synthetic coding sequence
  source 1..225: mol_type = other DNA
atgggcagagactatcgtacttgccttacaatcgtgcaaaagctgaagaaaatggtggataagcccactcaaagatccgtctcaaacgcagctaccagggtctgccgcaccggcagatctagatggagggatgtctgtaggaatttcatgagacgttaccagtctagagtgacccagggtctcgtggccggtgagaccgctcaacagatctgtgaagaccttaga

SEQ ID NO: 32885 - DNA, 225 bp, synthetic construct
  misc_feature 1..225: note = Description of Artificial Sequence: Synthetic coding sequence
  source 1..225: mol_type = other DNA
atgggcagagattaccggacctgcttgactattgttcagaagttgaagaagatggtagataaacctacccagcgtagcgtgtcaaacgccgctactcgcgtctgcagaaccggccggtctcggtggcgggacgtttgcagaaacttcatgagacggtatcaatctagggtcactcagggtttggtggcgggcgagactgcccagcagatctgcgaagatttgagg

SEQ ID NO: 32886 - DNA, 225 bp, synthetic construct
  misc_feature 1..225: note = Description of Artificial Sequence: Synthetic coding sequence
  source 1..225: mol_type = other DNA
atggggcgagattataggacatgcctgactatcgtccagaagctgaaaaagatggtggataaacccacacagcgtagtgtcagtaacgctgcaacacgggtgtgtcgcaccggccgttctaggtggcgggacgtgtgcagaaactttatgcggaggtaccagtctcgcgttacccagggtctcgtggctggcgaaaccgctcaacaaatctgcgaggacctgagg

SEQ ID NO: 32887 - DNA, 225 bp, synthetic construct
  misc_feature 1..225: note = Description of Artificial Sequence: Synthetic coding sequence
  source 1..225: mol_type = other DNA
atgggaagagactacagaacctgccttaccatcgtgcaaaaactgaagaagatggtggacaagccgacccagcggtcggttagcaacgctgccactcgggtgtgcaggactgggcgctcccgatggcgcgacgtgtgcaggaatttcatgagacggtaccagtcccgggtcacgcagggattggtggccggagagactgcacagcagatttgtgaggatctgaga

SEQ ID NO: 32888 - DNA, 225 bp, synthetic construct
  misc_feature 1..225: note = Description of Artificial Sequence: Synthetic coding sequence
  source 1..225: mol_type = other DNA
atgggacgagattatagaacctgcctgaccatagtgcagaagctgaagaagatggttgataagcctacccagcgaagtgtctctaacgccgccacccgcgtgtgtcggaccgggcggtccagatggcgggatgtgtgccgcaactttatgcgacgatatcagtccagagtcacccagggtctcgtcgctggcgaaacagctcagcagatctgtgaagacctgcgc

SEQ ID NO: 32889 - DNA, 225 bp, synthetic construct
  misc_feature 1..225: note = Description of Artificial Sequence: Synthetic coding sequence
  source 1..225: mol_type = other DNA
atggggcgagactatcgaacctgtttgacaattgttcagaagctcaagaaaatggttgataagcccactcaaaggtctgtctccaacgcggctacccgggtgtgtcgcacgggtaggtcacgatggagagacgtgtgtcgcaattttatgcggcgctatcagtcaagggtaactcaagggctggtggcaggcgagaccgcacaacagatctgcgaggacttgcgg

SEQ ID NO: 32890 - DNA, 225 bp, synthetic construct
  misc_feature 1..225: note = Description of Artificial Sequence: Synthetic coding sequence
  source 1..225: mol_type = other DNA
atgggaagagattaccgcacctgtcttactatcgtgcagaaactcaaaaagatggtggataaaccaacccaacgctcggtgtcaaacgcagcaacccgcgtgtgccggactgggagaagccgatggcgggatgtgtgtcgcaatttcatgcgtcggtaccagagccgtgtgacgcagggcctggtggctggcgagactgcacagcaaatttgtgaagatctgaga

SEQ ID NO: 32891 - DNA, 225 bp, synthetic construct
  misc_feature 1..225: note = Description of Artificial Sequence: Synthetic coding sequence
  source 1..225: mol_type = other DNA
atgggccgggattaccggacctgcctcactatcgtgcagaagctcaagaagatggtcgacaagcccacccaacgctcggtgtcaaacgccgcaacgcgcgtgtgcaggaccggccgcagcaggtggcgcgatgtctgccggaacttcatgcgccgctaccagtcgcgggtgacccaaggactggtcgccggggaaactgcgcaacagatctgcgaggacctcagg

SEQ ID NO: 32892 - DNA, 225 bp, synthetic construct
  misc_feature 1..225: note = Description of Artificial Sequence: Synthetic coding sequence
  source 1..225: mol_type = other DNA
atgggacgggactatcgcacttgtcttactatagttcagaaactcaagaagatggtcgacaagcccacacaacggtctgtgtccaatgcggctactagggtgtgcaggacagggaggagtcggtggcgcgatgtgtgtcggaactttatgcggaggtaccagtcacgcgttacacaagggctagtcgcgggggaaacagcccagcagatatgtgaggatctccgg

SEQ ID NO: 32893 - DNA, 225 bp, synthetic construct
  misc_feature 1..225: note = Description of Artificial Sequence: Synthetic coding sequence
  source 1..225: mol_type = other DNA
atgggtcgtgattatcgtacgtgtctaacgatagtacaaaaactaaaaaaaatggttgataaaccgacgcaacgatcggtatcgaatgcggcgacgcgagtatgtcgaacgggtcgatcgcgttggcgtgatgtttgtcgaaattttatgcgacgttatcaatcgcgtgttacgcaaggtttagtagcgggtgaaacggcgcaacaaatatgtgaagatttacgt

SEQ ID NO: 32894 - DNA, 225 bp, synthetic construct
  misc_feature 1..225: note = Description of Artificial Sequence: Synthetic coding sequence
  source 1..225: mol_type = other DNA
atgggacgggactaccgcacttgtctgaccattgtgcaaaaactgaagaagatggtcgacaagccgactcagcggagcgtttcaaacgcagctacgagggtttgtcgaactggtagatcgcggtggcgcgacgtgtgccggaatttcatgagacgttaccaaagcagagtcacccagggacttgtggcgggcgaaacggcccagcagatctgcgaggatctccgg

SEQ ID NO: 32895 - DNA, 225 bp, synthetic construct
  misc_feature 1..225: note = Description of Artificial Sequence: Synthetic coding sequence
  source 1..225: mol_type = other DNA
atgggacgagattatcggacgtgcttaactatagtccaaaaacttaagaagatggtcgacaagcctacacagcgctccgtgagtaatgctgcgaccagagtgtgtcggacggggcggagcaggtggcgggatgtttgccggaacttcatgaggcgttatcagtcacgggtgacccagggactggtggcaggagaaaccgcgcagcagatctgtgaggatctccgg

SEQ ID NO: 32896 - DNA, 225 bp, synthetic construct
  misc_feature 1..225: note = Description of Artificial Sequence: Synthetic coding sequence
  source 1..225: mol_type = other DNA
atgggccgtgactaccgcacatgtcttaccatcgtgcagaaacttaaaaagatggtggataagcctacacagcggtccgtgagtaacgcagctacacgcgtctgtagaacgggccggtctaggtggcgtgatgtctgccgcaattttatgagaagataccagagtcgcgtgacgcaggggttagtggcaggagagacagcccagcagatatgcgaagatctccgg

SEQ ID NO: 32897 - DNA, 225 bp, synthetic construct
  misc_feature 1..225: note = Description of Artificial Sequence: Synthetic coding sequence
  source 1..225: mol_type = other DNA
atggggcgagactaccgaacgtgcctgactattgtgcaaaagttgaagaagatggtggataagccaactcagcggtcggtgagcaacgccgcaactcgcgtgtgcagaaccggcagatcccgctggcgtgatgtctgtagaaacttcatgcggaggtaccagagcagagtgacccaaggactggtggcgggagaaaccgctcaacagatttgtgaggatttgcgt

SEQ ID NO: 32898 - DNA, 225 bp, synthetic construct
  misc_feature 1..225: note = Description of Artificial Sequence: Synthetic coding sequence
  source 1..225: mol_type = other DNA
atggggcgcgattaccggacatgtctgactatagttcagaagctgaaaaagatggtggataagccaactcagagatcggtgtctaatgctgccactcgcgtgtgtaggacaggaaggtctagatggcgcgatgtgtgtcgaaatttcatgagaagataccagtcaagggtaacgcagggactggttgccggggagacagctcagcagatctgtgaggacctgcgc

SEQ ID NO: 32899 - DNA, 225 bp, synthetic construct
  misc_feature 1..225: note = Description of Artificial Sequence: Synthetic coding sequence
  source 1..225: mol_type = other DNA
atgggaagagattaccggacctgtttgactatcgtccagaagttgaagaaaatggttgataagcctactcagcgctctgtatcgaacgccgctacaagagtctgccggaccgggagaagccggtggcgggatgtgtgtcgcaactttatgaggagataccagtcccgggtgacccagggactggtcgctggagaaaccgcccaacagatctgtgaagatttgaga

SEQ ID NO: 32900 - DNA, 225 bp, synthetic construct
  misc_feature 1..225: note = Description of Artificial Sequence: Synthetic coding sequence
  source 1..225: mol_type = other DNA
atgggaagggattatcgaacgtgcttgacaatagttcagaagctgaaaaaaatggtggacaagccgacccagagaagtgtgagcaatgccgcaactcgcgtgtgcaggacaggtaggtcaaggtggagggatgtgtgccggaacttcatgcgcagatatcagagccgcgtgactcagggcttggtggccggtgagaccgcacaacaaatctgcgaggacctgagg

SEQ ID NO: 32901 - DNA, 225 bp, synthetic construct
  misc_feature 1..225: note = Description of Artificial Sequence: Synthetic coding sequence
  source 1..225: mol_type = other DNA
atgggtagggattataggacatgtttgaccatcgtccaaaagttgaagaagatggtagacaagccaacacaaagaagtgtctccaacgccgctacacgcgtttgccgcacaggccgcagtagatggagagacgtgtgtaggaatttcatgcgcagataccaatcaagagttacgcaaggcctggtggctggagaaactgcgcagcagatctgcgaagatttgagg

SEQ ID NO: 32902 - DNA, 225 bp, synthetic construct
  misc_feature 1..225: note = Description of Artificial Sequence: Synthetic coding sequence
  source 1..225: mol_type = other DNA
atgggacgggattacaggacctgtcttaccatcgtccagaagctaaagaagatggttgataaaccaactcagcggagtgtaagtaacgcggctacacgggtgtgcaggactggccgctctcggtggcgggatgtatgtagaaactttatgagacgttatcagtccagagtgactcaaggacttgtagcgggtgaaaccgctcagcaaatatgcgaagatctaagg

SEQ ID NO: 32903 - DNA, 225 bp, synthetic construct
  misc_feature 1..225: note = Description of Artificial Sequence: Synthetic coding sequence
  source 1..225: mol_type = other DNA
atgggtcgcgattacaggacgtgcctcacgatagttcagaagttgaaaaagatggtggacaagcctacccaacgatcagtctcaaatgccgcaacccgcgtgtgtagaactggtagatcccggtggcgagatgtgtgtcggaactttatgaggagataccaatcccgggtgactcagggactggtggcaggagagactgcacaacaaatatgtgaagatcttagg

SEQ ID NO: 32904 - DNA, 225 bp, synthetic construct; identical to SEQ ID NO: 32881
  misc_feature 1..225: note = Description of Artificial Sequence: Synthetic coding sequence
  source 1..225: mol_type = other DNA

SEQ ID NO: 32905 - DNA, 225 bp, synthetic construct
  misc_feature 1..225: note = Description of Artificial Sequence: Synthetic coding sequence
  source 1..225: mol_type = other DNA
atgggtagggattatcgaacctgtttgactatcgtccagaagctcaagaaaatggtggacaaaccaacacaacgatccgtgagcaatgccgctacgcgtgtatgcaggacgggccgatcccgatggcgcgatgtatgtagaaatttcatgcggcgataccagagtcgagttacacaaggcctggtggctggtgaaaccgcgcagcagatctgtgaagaccttcga

SEQ ID NO: 32906 - DNA, 225 bp, synthetic construct
  misc_feature 1..225: note = Description of Artificial Sequence: Synthetic coding sequence
  source 1..225: mol_type = other DNA
atgggacgggactatcgtacttgcctgactattgtccagaaactgaagaagatggttgacaagcccactcaacggtccgtctctaacgcggcaacacgggtgtgccgaactgggcgttcacgctggcgggacgtgtgtcgtaattttatgcgtcgctatcagagtagggtgacccagggcctcgtcgccggagaaactgcgcagcagatatgtgaagacctgaga

SEQ ID NO: 32907 - DNA, 225 bp, synthetic construct
  misc_feature 1..225: note = Description of Artificial Sequence: Synthetic coding sequence
  source 1..225: mol_type = other DNA
atgggtcgggattaccgcacttgcttgacgatcgtgcagaagctgaaaaagatggtggataagccgacccaacggtccgtatcgaatgctgcaactcgggtttgtaggaccggcagatcgaggtggcgggacgtctgcagaaacttcatgcgaaggtaccagagcagggtgacccaggggcttgtcgccggagaaacggcgcagcaaatctgcgaggacctcagg

SEQ ID NO: 32908 - DNA, 225 bp, synthetic construct
  misc_feature 1..225: note = Description of Artificial Sequence: Synthetic coding sequence
  source 1..225: mol_type = other DNA
atgggtagagactacagaacgtgcttgactatcgtgcaaaaactcaagaagatggtagataagccgacccagcgatcagtttctaatgcagcgaccagggtgtgtcggaccggacgctcgcggtggcgcgacgtgtgccgtaacttcatgcgtaggtaccagtcccgggtcactcaggggctggtggctggcgaaaccgcccaacagatctgcgaggaccttcgc

SEQ ID NO: 32909 - DNA, 225 bp, synthetic construct
  misc_feature 1..225: note = Description of Artificial Sequence: Synthetic coding sequence
  source 1..225: mol_type = other DNA
atgggccgcgattatcgaacatgcctcacgattgtacaaaagctcaagaaaatggttgataaaccaacgcagcgaagcgtgagcaacgcggcaacacgggtgtgtcgaaccggtagaagccgttggcgggatgtgtgtcgcaacttcatgcgccgttatcaaagccgtgtgacccagggcttagtggcaggggagacggcccagcagatttgcgaggacctcaga

SEQ ID NO: 32910 - DNA, 225 bp, synthetic construct
  misc_feature 1..225: note = Description of Artificial Sequence: Synthetic coding sequence
  source 1..225: mol_type = other DNA
atgggacgggattatcgcacttgcctgaccatagtgcagaaacttaagaagatggtggacaagcctactcaaaggagcgtctcgaacgctgcaactcgagtgtgtcggaccgggcgtagcaggtggcgggatgtgtgtcgcaactttatgcgaaggtaccagtccagagtcactcaaggactggtcgcgggggaaaccgcacaacagatttgtgaggatctgcgt

SEQ ID NO: 32911 - DNA, 225 bp, synthetic construct
  misc_feature 1..225: note = Description of Artificial Sequence: Synthetic coding sequence
  source 1..225: mol_type = other DNA
atgggccgggactacagaacttgcctgaccatcgtgcagaaactcaagaagatggtggataaaccgactcagcgctcggtgagcaacgccgcgacccgcgtctgcaggactggccggagcaggtggagagacgtgtgtcgcaatttcatgcgccggtaccaatcccgcgtgacgcagggactggtggccggggagactgcccagcagatttgcgaagatctcaga

SEQ ID NO: 32912 - DNA, 225 bp, synthetic construct
  misc_feature 1..225: note = Description of Artificial Sequence: Synthetic coding sequence
  source 1..225: mol_type = other DNA
atgggaagggactatcgtacttgtctgacgatcgtacagaaactcaaaaagatggtcgataaaccaacacaacggagcgtgtctaatgccgctactcgcgtgtgtcggactggcagaagtcggtggagagatgtctgtcggaattttatgcgtcggtatcagtcaagggtaactcaggggctcgtagccggcgaaaccgcccagcagatctgtgaagatctgagg

SEQ ID NO: 32913 - DNA, 225 bp, synthetic construct
  misc_feature 1..225: note = Description of Artificial Sequence: Synthetic coding sequence
  source 1..225: mol_type = other DNA
atggggcgagactatcgaacttgcctgacaattgtgcagaagctaaagaagatggtggataaacctacgcagagaagcgtgtccaatgctgctactcgcgtctgcaggaccggaaggtcaagatggcgagatgtatgccggaacttcatgcggcggtaccagagtcgcgttacgcaaggcctggtagctggagaaacagctcaacagatctgtgaagatctgcgg

SEQ ID NO: 32914 - DNA, 225 bp, synthetic construct
  misc_feature 1..225: note = Description of Artificial Sequence: Synthetic coding sequence
  source 1..225: mol_type = other DNA
atgggacgggattatcggacttgtctcacaatagtgcagaaactcaaaaaaatggtggataagcccactcagagatccgtgagtaacgctgctacaagggtttgcaggactggacgatctaggtggcgagacgtgtgtcgcaactttatgagaagatatcagtctcgggttacacagggactagtggctggggaaacagcccagcagatttgtgaagaccttagg

SEQ ID NO: 32915 - DNA, 225 bp, synthetic construct
  misc_feature 1..225: note = Description of Artificial Sequence: Synthetic coding sequence
  source 1..225: mol_type = other DNA
atggggagagactaccgcacctgtctgactatcgttcagaaacttaagaagatggtggacaaacccacccagcgcagcgtctcaaacgccgcgacaagagtttgtcgtacgggccggtctcggtggcgcgatgtgtgtagaaacttcatgagaaggtaccagtcgcgcgtgactcagggcctagtggctggcgagaccgcccagcagatctgtgaggatctgaga

SEQ ID NO: 32916 - DNA, 225 bp, synthetic construct
  misc_feature 1..225: note = Description of Artificial Sequence: Synthetic coding sequence
  source 1..225: mol_type = other DNA
atgggccgtgattaccgtacctgtttaaccatagttcagaagctgaaaaagatggttgacaagccaacccagcggtcagtatccaatgccgcaacgcgtgtgtgccgtacgggtcggagtcgctggcgggatgtatgtcgcaacttcatgcgacgctaccagtcccgcgtgacgcagggcctcgttgccggagagacagcccagcaaatatgtgaggaccttcgt

SEQ ID NO: 32917 - DNA, 225 bp, synthetic construct
  misc_feature 1..225: note = Description of Artificial Sequence: Synthetic coding sequence
  source 1..225: mol_type = other DNA
atgggaagggactacagaacctgcttgactattgtgcagaagcttaagaagatggtggataaacccacgcagagaagcgtctctaatgctgccacccgcgtctgccggacaggtcgatcacgctggcgcgatgtatgtaggaattttatgaggaggtatcaatcccgcgtgacccagggcttggttgctggggaaaccgctcaacaaatctgtgaggatcttcga

SEQ ID NO: 32918 - DNA, 225 bp, synthetic construct
  misc_feature 1..225: note = Description of Artificial Sequence: Synthetic coding sequence
  source 1..225: mol_type = other DNA
atgggacgcgactacagaacttgtctgaccatcgtgcagaagctcaaaaagatggtggacaagccaactcagcggagcgtttcgaacgcggccactcgtgtgtgtcggacgggccggtcacgctggagggacgtgtgccgcaacttcatgcggcggtaccagtcgcgggtcactcaggggctggtggccggagaaactgcgcagcaaatctgcgaggatctccgg

SEQ ID NO: 32919 - DNA, 225 bp, synthetic construct
  misc_feature 1..225: note = Description of Artificial Sequence: Synthetic coding sequence
  source 1..225: mol_type = other DNA
atgggacgcgattaccgaacttgcctgactatcgtccaaaagctgaaaaagatggtcgacaagccaacgcaaaggtccgtgtccaacgcagcgaccagagtctgtcgcaccggacgtagccgctggagggacgtctgtagaaactttatgcggcgctaccagtcccgtgtgactcagggtcttgtggccggggaaaccgcacagcaaatctgcgaggatctgcgg

SEQ ID NO: 32920 - DNA, 225 bp, synthetic construct
  misc_feature 1..225: note = Description of Artificial Sequence: Synthetic coding sequence
  source 1..225: mol_type = other DNA
atgggtcgtgattaccgtacttgtctaaccatagtccaaaagcttaagaaaatggtcgataagcccactcaacggagtgtgagcaacgctgccacacgcgtttgcaggaccggaagaagcaggtggcgggacgtatgtcgcaactttatgcgaaggtatcagagcagggttacacaagggctggtcgccggtgaaaccgcgcagcaaatatgcgaagatctcaga

SEQ ID NO: 32921 - DNA, 225 bp, synthetic construct
  misc_feature 1..225: note = Description of Artificial Sequence: Synthetic coding sequence
  source 1..225: mol_type = other DNA
atggggcgcgactacagaacttgtttgacgatcgtgcaaaagctcaaaaagatggtcgataaaccgacccagagatcagtctccaatgccgcaaccagggtgtgccgaactggccgctcccggtggagagacgtgtgccgcaacttcatgcggcggtaccaatcgcgtgtgacccagggacttgtcgcaggagaaaccgctcagcagatttgcgaggatctgcgg

SEQ ID NO: 32922 - DNA, 225 bp, synthetic construct
  misc_feature 1..225: note = Description of Artificial Sequence: Synthetic coding sequence
  source 1..225: mol_type = other DNA
atggggagagattacagaacgtgcctgacaattgttcagaagctgaaaaagatggtggacaaacccactcaacgcagcgtctcaaatgctgccacaagagtgtgtcggactgggcgatcaaggtggcgggatgtgtgtcgcaattttatgaggcgctaccagtctcgcgtgacccagggtctggtcgctggggaaacagctcaacagatctgcgaggatcttaga

SEQ ID NO: 32923 - DNA, 225 bp, synthetic construct
  misc_feature 1..225: note = Description of Artificial Sequence: Synthetic coding sequence
  source 1..225: mol_type = other DNA
atgggccgagattaccggacgtgtctgactatcgttcagaaattgaaaaagatggtggataagcccactcagcggtccgtcagtaatgcagccacccgtgtgtgtcgcactggccggagtcgttggcgcgatgtgtgtagaaatttcatgcgtagatatcaatcacgcgtgactcaggggctggtggccggtgaaactgcccagcaaatctgcgaggatctgcga

SEQ ID NO: 32924 - DNA, 225 bp, synthetic construct
  misc_feature 1..225: note = Description of Artificial Sequence: Synthetic coding sequence
  source 1..225: mol_type = other DNA
atgggtagggattacagaacatgcctcacaatagtgcaaaagctcaaaaagatggtggacaagcccacgcagaggtcggtttcaaatgccgctactcgtgtatgccgcactggcaggagtcggtggagagacgtttgtagaaacttcatgaggcgataccagtctcgagtgacccagggccttgttgccggcgaaactgcccagcaaatctgcgaggacttgagg

SEQ ID NO: 32925 - DNA, 225 bp, synthetic construct
  misc_feature 1..225: note = Description of Artificial Sequence: Synthetic coding sequence
  source 1..225: mol_type = other DNA
atgggccgggactaccgtacttgcctgaccatcgtccagaagctgaaaaagatggtcgataagccgactcaaagaagcgtgtcaaacgcagcgacgagagtgtgtcgcaccggacggtcgcgctggcgcgatgtgtgccgaaatttcatgcggaggtaccagtcccgggttactcagggattggtggccggggaaaccgctcaacagatctgcgaggacctccgc

SEQ ID NO: 32926 - DNA, 225 bp, synthetic construct
  misc_feature 1..225: note = Description of Artificial Sequence: Synthetic coding sequence
  source 1..225: mol_type = other DNA
atgggaagggactatcgtacctgtttgactattgttcaaaagctcaagaaaatggtggataagccaacccaacgttcagtgagcaacgcagcaactcgcgtgtgtcgcacgggtaggtccagatggcgagatgtctgcagaaatttcatgagacggtaccaatcaagagtgacccagggactggttgccggagaaaccgcccagcagatatgtgaggatcttcgc

SEQ ID NO: 32927 - DNA, 225 bp, synthetic construct
  misc_feature 1..225: note = Description of Artificial Sequence: Synthetic coding sequence
  source 1..225: mol_type = other DNA
atgggaagggactaccggacgtgtctcacaatagtgcagaagcttaaaaagatggttgacaagccgacccagaggagcgtttcaaatgccgccacccgggtttgccggacggggcggagcaggtggcgggatgtgtgtagaaatttcatgaggagatatcaatccagagtgacacaggggcttgtggctggtgagaccgcccagcaaatatgcgaggacctgagg

SEQ ID NO: 32928 - DNA, 225 bp, synthetic construct
  misc_feature 1..225: note = Description of Artificial Sequence: Synthetic coding sequence
  source 1..225: mol_type = other DNA
atgggtcgcgattaccggacctgtctgactattgtgcagaaactgaaaaagatggtggataagcctacccaaaggagcgtttccaatgcagcaactcgcgtgtgtaggacggggcggtccagatggagagacgtgtgtcggaactttatgaggagataccagtcccgggtcacgcagggcctcgtcgccggagagacggctcaacagatttgcgaggatttgaga

SEQ ID NO: 32929 - DNA, 225 bp, synthetic construct
  misc_feature 1..225: note = Description of Artificial Sequence: Synthetic coding sequence
  source 1..225: mol_type = other DNA
atgggacgagattacaggacatgtctgacaatcgtacaaaaacttaaaaaaatggtggataaaccgacacaacgctctgtctctaatgcggctacacgtgtttgtagaacaggacgctcacgttggcgtgatgtttgtaggaactttatgcgtcgctaccaaagccgtgttacccagggcctcgtcgctggggagacggcccagcagatctgcgaagatctaagg

SEQ ID NO: 32930 - DNA, 225 bp, synthetic construct
  misc_feature 1..225: note = Description of Artificial Sequence: Synthetic coding sequence
  source 1..225: mol_type = other DNA
atgggacgggattatcggacctgtctgaccattgtgcaaaagcttaagaaaatggtagacaagcctacgcaacggagcgtatccaatgccgcgaccagagtctgtcggacgggacgcagccgttggcgagatgtttgcagaaactttatgcgtagataccagagcagggtcacacaggggctggtagcaggcgagaccgcccagcagatctgcgaagacctgagg

SEQ ID NO: 32931 - DNA, 225 bp, synthetic construct
  misc_feature 1..225: note = Description of Artificial Sequence: Synthetic coding sequence
  source 1..225: mol_type = other DNA
atgggccgggattataggacctgtctgaccattgtccagaagctgaaaaaaatggtagacaagcctacacaaaggtctgttagtaacgcagctactagagtctgcaggacaggtcgctcaagatggcgcgatgtgtgtagaaactttatgagacgatatcagagccgcgtgacacaaggcctggtcgccggagagaccgcccaacagatttgcgaagacctgcgc

SEQ ID NO: 32932 - DNA, 225 bp, synthetic construct
  misc_feature 1..225: note = Description of Artificial Sequence: Synthetic coding sequence
  source 1..225: mol_type = other DNA
atgggaagggactaccgtacttgtctgacaatcgttcagaagctcaagaaaatggtggataaaccgacccaacggagtgtgagtaatgctgcaactcgcgtgtgccggacgggaaggtccaggtggcgggatgtgtgtcggaacttcatgaggcgctaccagtctcgcgttacccaagggctggtagctggtgaaactgctcagcagatatgtgaggatctccgc

SEQ ID NO: 32933 - DNA, 225 bp, synthetic construct
  misc_feature 1..225: note = Description of Artificial Sequence: Synthetic coding sequence
  source 1..225: mol_type = other DNA
atggggcgggactaccgcacttgcctgacgattgtgcagaaacttaagaagatggtggacaagccaactcaaagatctgtttcgaacgctgccaccagagtgtgccgcaccggacgcagccgctggcgggatgtgtgcaggaatttcatgcggcgttaccaatcgcgggtcacccagggtctggtggccggcgaaaccgcgcagcagatctgtgaggatctgcgg

SEQ ID NO: 32934 - DNA, 225 bp, synthetic construct
  misc_feature 1..225: note = Description of Artificial Sequence: Synthetic coding sequence
  source 1..225: mol_type = other DNA
atgggtcgggattaccgcacttgtcttaccattgtgcagaagttgaaaaagatggtggataagcctacccagcgaagcgtctcgaatgccgctactagagtctgtaggactgggaggtcacgctggcgggatgtgtgtcggaactttatgaggaggtaccagagcagggtgactcaagggcttgtggcaggagaaaccgcgcaacagatctgcgaggatcttcgc

SEQ ID NO: 32935 - DNA, 225 bp, synthetic construct
  misc_feature 1..225: note = Description of Artificial Sequence: Synthetic coding sequence
  source 1..225: mol_type = other DNA
atggggagagattatcgcacatgtttaactattgtccaaaaactaaaaaaaatggttgacaaacctacacagagatctgttagtaatgctgccacgcgcgtgtgcaggacaggacggtcacgatggcgggatgtatgtagaaattttatgcggcgatatcagtcccgcgtaactcaggggctggtggcaggagagacggcacagcagatctgtgaagatctcaga

SEQ ID NO: 32936 - DNA, 225 bp, synthetic construct
  misc_feature 1..225: note = Description of Artificial Sequence: Synthetic coding sequence
  source 1..225: mol_type = other DNA
atgggccgtgactacagaacctgcctcactatcgtccaaaaacttaagaagatggtggacaagcccacgcagcgttctgtctctaacgcagcaacccgggtgtgtcgtaccggacgctcccgctggagagatgtgtgtaggaacttcatgcggcggtaccaatcgagggtcactcagggccttgtggcaggggagactgctcaacagatttgtgaagatctgcgc

SEQ ID NO: 32937 - DNA, 225 bp, synthetic construct
  misc_feature 1..225: note = Description of Artificial Sequence: Synthetic coding sequence
  source 1..225: mol_type = other DNA
atgggtagagattaccgcacttgtcttactatcgtccaaaagctgaaaaagatggtggataagccaactcagcgctctgtaagcaacgcagcaactcgcgtgtgtagaaccggccgttcgagatggcgggatgtgtgccgaaactttatgaggagataccagtcacgggtgacgcagggtcttgtggcaggagaaactgcccaacagatttgtgaggacctgcgg

SEQ ID NO: 32938 - DNA, 225 bp, synthetic construct
  misc_feature 1..225: note = Description of Artificial Sequence: Synthetic coding sequence
  source 1..225: mol_type = other DNA
atggggagagactaccggacctgcctcaccatcgtgcaaaaactgaagaaaatggtggacaagccgactcagcggtcggtgtccaatgccgctacccgagtatgccggactggccgatcacggtggagagatgtctgcaggaacttcatgcggcgctaccagtcccgcgtgactcagggactggtggctggagaaacggcacaacagatttgtgaggatttgcgc

SEQ ID NO: 32939 - DNA, 225 bp, synthetic construct
  misc_feature 1..225: note = Description of Artificial Sequence: Synthetic coding sequence
  source 1..225: mol_type = other DNA
atgggtagagattacagaacctgtctgaccatcgtgcaaaaacttaagaagatggtggacaagccgactcagagatcggtttccaacgctgccaccagagtctgtcggactggacgaagccggtggcgggatgtgtgccgcaactttatgaggcgctaccaatccagggtgactcagggactggtagccggggaaacggcgcagcagatctgtgaggacttgagg

SEQ ID NO: 32940 - DNA, 225 bp, synthetic construct
  misc_feature 1..225: note = Description of Artificial Sequence: Synthetic coding sequence
  source 1..225: mol_type = other DNA
atgggtagagattataggacctgtttgacgatcgtccagaagcttaagaagatggtggataagcctactcagcggagtgtatctaacgccgccacacgcgtttgtaggaccggaaggagccgatggcgggacgtttgtcggaatttcatgaggcggtaccagagcagagtgacccagggtttggtggccggggagacagctcagcagatctgtgaagatctcaga

SEQ ID NO: 32941 - DNA, 225 bp, synthetic construct
  misc_feature 1..225: note = Description of Artificial Sequence: Synthetic coding sequence
  source 1..225: mol_type = other DNA
atgggaagagattatagaacttgtcttactatcgtacaaaaactaaaaaaaatggttgataaacctactcagaggagtgtatctaacgcagcaaccagggtatgtaggacggggcgttctcgatggagggacgtttgtaggaattttatgagacgatatcaatcgcgagttacacagggccttgtggctggagaaaccgcacagcaaatctgtgaggatctcagg

SEQ ID NO: 32942 - DNA, 225 bp, synthetic construct
  misc_feature 1..225: note = Description of Artificial Sequence: Synthetic coding sequence
  source 1..225: mol_type = other DNA
atgggaagggattaccgcacttgtttaacaattgttcaaaagttaaaaaagatggtcgacaaacccacgcagcgttctgttagcaacgcagcaactagagtttgtcgaactggaagatccagatggcgagacgtctgtcgtaatttcatgcgacgatatcagagccgagttacacaaggactagtagctggcgaaacggcacaacaaatatgcgaagacttaaga

SEQ ID NO: 32943 - DNA, 225 bp, synthetic construct
  misc_feature 1..225: note = Description of Artificial Sequence: Synthetic coding sequence
  source 1..225: mol_type = other DNA
atgggacgcgattaccgcacatgcctgaccatagtacaaaaactgaaaaagatggtcgacaagccaactcaaagatccgtctccaatgccgcaacaagagtctgtaggactggccgcagtcgctggcgcgatgtgtgtaggaacttcatgaggcggtatcagagtcgggttacccagggcttggtagccggggagacagcccagcagatttgcgaggacctgaga

SEQ ID NO: 32944 - DNA, 225 bp, synthetic construct
  misc_feature 1..225: note = Description of Artificial Sequence: Synthetic coding sequence
  source 1..225: mol_type = other DNA
atgggccgggattacagaacatgtcttaccattgtacagaaattgaagaagatggtcgataagcccacccagagatctgtcagcaacgccgctacccgcgtatgcagaaccggaagaagtcggtggcgcgatgtgtgccgtaacttcatgagacggtatcagtcccgcgtcacacagggccttgttgccggggagacagcccagcagatttgtgaggatctaaga

SEQ ID NO: 32945 - DNA, 225 bp, synthetic construct
  misc_feature 1..225: note = Description of Artificial Sequence: Synthetic coding sequence
  source 1..225: mol_type = other DNA
atggggcgggactaccgtacatgtctcaccattgttcagaaattgaaaaagatggttgataaacccacgcagcgcagtgtgtcaaatgctgcgacacgcgtctgccggacaggtaggagccggtggcgggacgtgtgtcgcaattttatgaggagatatcagtcccgcgtgacccaaggcctagttgcgggcgagacagcgcaacagatatgcgaggacctccgg

SEQ ID NO: 32946 - DNA, 225 bp, synthetic construct
  misc_feature 1..225: note = Description of Artificial Sequence: Synthetic coding sequence
  source 1..225: mol_type = other DNA
atggggagagactaccgcacgtgcctgaccatcgtgcagaaactgaagaaaatggtcgacaaaccaacccagcggtcggtgtcaaacgcagcgacccgggtgtgccgcaccggacgcagcagatggagagacgtgtgccggaatttcatgaggagataccagtcgcgcgtcacgcaaggactggtggccggcgaaactgctcagcagatctgtgaggatttgcga

SEQ ID NO: 32947 - DNA, 225 bp, synthetic construct
  misc_feature 1..225: note = Description of Artificial Sequence: Synthetic coding sequence
  source 1..225: mol_type = other DNA
atgggaagagactatcgcacctgtctaacaatcgtgcagaagcttaaaaaaatggtggacaagcctacacaaaggtctgtctccaacgccgccacacgtgtgtgcagaacaggccgttcgcgttggagagatgtttgcagaaattttatgcgtcgctaccagtctcgagtgacccagggtctagttgccggagaaacagcccagcaaatctgtgaagatttgagg

SEQ ID NO: 32948 - DNA, 225 bp, synthetic construct
  misc_feature 1..225: note = Description of Artificial Sequence: Synthetic coding sequence
  source 1..225: mol_type = other DNA
atggggagagattacaggacgtgccttacgattgttcagaagctaaaaaagatggtggacaagcccactcagaggtctgtgtctaacgcggcgactagggtctgtcgcaccggcagaagcagatggcgggacgtctgcaggaatttcatgcggcggtatcagtcccgtgttacccaggggctggtggcaggggagacagcccagcagatctgcgaggaccttaga

SEQ ID NO: 32949 - DNA, 225 bp, synthetic construct
  misc_feature 1..225: note = Description of Artificial Sequence: Synthetic coding sequence
  source 1..225: mol_type = other DNA
atgggccgcgactaccggacatgcctcaccatcgtccaaaagctgaagaagatggtggataaacccacgcagagatcagtgtcaaatgccgccactcgggtctgtcgaacaggtcggtcacgctggcgagacgtgtgcagaaattttatgcggagataccagtcacgggtgacacagggtctggtcgccggggagaccgcccagcagatttgtgaggatttgaga

SEQ ID NO: 32950 - DNA, 225 bp, synthetic construct
  misc_feature 1..225: note = Description of Artificial Sequence: Synthetic coding sequence
  source 1..225: mol_type = other DNA
atgggccgggattacaggacatgtttgactattgtgcaaaaattgaaaaaaatggtggataaaccgacacagagaagtgtgtccaacgctgcgaccagagtttgccggacgggaaggtcccgatggagagacgtttgtcgaaatttcatgcgccggtaccagtctcgcgtgactcagggacttgtcgcaggggagacagctcagcagatctgtgaggacttgaga

SEQ ID NO: 32951 - DNA, 225 bp, synthetic construct
  misc_feature 1..225: note = Description of Artificial Sequence: Synthetic coding sequence
  source 1..225: mol_type = other DNA
atgggcagggactatcggacttgcttgactatcgtccagaagttgaaaaagatggtcgacaagcccactcagcgttccgtctccaacgccgcgacaagagtttgtcgcacaggtcggtcccgatggcgtgacgtgtgccgtaattttatgcgtcgctatcaatcgcgcgtcacccagggactggttgctggcgagaccgcacagcaaatctgcgaggacctgcgt

SEQ ID NO: 32952 - DNA, 225 bp, synthetic construct
  misc_feature 1..225: note = Description of Artificial Sequence: Synthetic coding sequence
  source 1..225: mol_type = other DNA
atgggaagagattaccggacttgtcttactattgtccaaaaactgaagaagatggtcgataagccaacccaacggtctgtgtcaaatgccgccacccgggtgtgtcggaccggaaggtccagatggcgcgacgtttgtcgtaacttcatgagacgctaccagtccagagtgacccagggcctggtggcaggagaaactgcccagcagatctgtgaagatctcaga

SEQ ID NO: 32953 - DNA, 225 bp, synthetic construct
  misc_feature 1..225: note = Description of Artificial Sequence: Synthetic coding sequence
  source 1..225: mol_type = other DNA
atgggccgggactaccgtacctgtctgacgatcgtgcagaagctcaagaaaatggtggacaagccaacccagcggagcgtcagcaatgccgccacccgggtgtgtagaaccggacgcagccggtggagagacgtgtgccgaaacttcatgagacggtaccagtcgagggtgacccagggactcgtcgctggcgaaaccgcacaacaaatttgcgaggacctgcgg

SEQ ID NO: 32954 - DNA, 225 bp, synthetic construct
  misc_feature 1..225: note = Description of Artificial Sequence: Synthetic coding sequence
  source 1..225: mol_type = other DNA
atgggaagagactaccgaacgtgtcttactatagtgcaaaagctgaagaaaatggtggataagcctacccaacgttcagtgtccaatgctgcaaccagagtgtgtcgcactggtaggagccgatggcgggatgtctgcagaaacttcatgcgtcgatatcagtcacgagttactcaagggttggtcgcgggcgaaaccgcacaacagatctgtgaagatctgcga

SEQ ID NO: 32955 - DNA, 225 bp, synthetic construct
  misc_feature 1..225: note = Description of Artificial Sequence: Synthetic coding sequence
  source 1..225: mol_type = other DNA
atgggacgcgattacagaacttgcctgaccatcgtgcagaagctcaaaaagatggttgacaagccgacccagcggagtgtctctaacgccgcgaccagggtgtgccgcaccggtcggagccgctggcgcgacgtgtgcagaaatttcatgcgtcggtaccaatcgagagtgactcagggcttggtcgctggggaaactgcccagcaaatctgtgaggacctccgc

SEQ ID NO: 32956 - DNA, 225 bp, synthetic construct
  misc_feature 1..225: note = Description of Artificial Sequence: Synthetic coding sequence
  source 1..225: mol_type = other DNA
atgggcagagattaccgaacctgtctcaccattgtgcagaagctcaagaagatggtcgacaaacccacgcaacggtcagtctcgaacgccgctactagggtttgtcggacggggaggagcagatggcgtgacgtgtgccgcaactttatgagacggtaccaaagccgagtgacccagggacttgtggcaggtgaaaccgcacaacagatctgtgaagatctgcgt

SEQ ID NO: 32957 - DNA, 225 bp, synthetic construct
  misc_feature 1..225: note = Description of Artificial Sequence: Synthetic coding sequence
  source 1..225: mol_type = other DNA
atgggacgggattatcggacctgcctgacgatcgtgcaaaagctgaagaaaatggtcgacaagcccacacaaaggtcagtgtccaacgcagctacgagggtgtgtcgaacagggcgcagtcgttggcgtgatgtttgtcgtaatttcatgcgaaggtaccaatccagagtgacccagggactggtagccggtgaaaccgcccaacagatttgcgaggacctcaga

SEQ ID NO: 32958 - DNA, 225 bp, synthetic construct
  misc_feature 1..225: note = Description of Artificial Sequence: Synthetic coding sequence
  source 1..225: mol_type = other DNA
atgggaagggattaccggacttgtctcactatcgtccagaagctgaagaaaatggttgacaagccaacccaacggtcggtgtccaatgcagctacgcgcgtctgtaggaccggtcgttcacggtggcgtgacgtgtgccgcaactttatgagaagataccaatcgcgcgtcactcaaggcctggtggcaggcgaaacggcccagcagatatgcgaggatctccgg

SEQ ID NO: 32959 - DNA, 225 bp, synthetic construct
  misc_feature 1..225: note = Description of Artificial Sequence: Synthetic coding sequence
  source 1..225: mol_type = other DNA
atgggccgggactaccgcacttgcctgactattgtccaaaagctgaagaaaatggtggataagccgactcagcgtagcgtctcaaatgccgcgacccgggtgtgcaggaccggacggtccagatggagagatgtgtgccgtaatttcatgcggcgctaccaatcgcgggtgactcagggactggtggctggggaaactgcgcagcagatctgcgaagatctgagg

SEQ ID NO: 32960 - DNA, 225 bp, synthetic construct
  misc_feature 1..225: note = Description of Artificial Sequence: Synthetic coding sequence
  source 1..225: mol_type = other DNA
atgggccgagactacagaacgtgcttgacgattgttcagaaactcaagaagatggtggacaagcctacgcaaaggtccgtgagcaatgcagccaccagagtttgcagaactgggagatctagatggcgggacgtgtgccggaatttcatgagaagataccagtcaagggtgactcagggtctggttgcaggggagaccgcacagcagatttgtgaagacctccgc

SEQ ID NO: 32961 - DNA, 225 bp, synthetic construct
  misc_feature 1..225: note = Description of Artificial Sequence: Synthetic coding sequence
  source 1..225: mol_type = other DNA
atgggtagagattatagaacttgtttaacaatagttcaaaaattaaaaaaaatggtagataagccaactcaacgatcagtatctaacgctgctacaagggtatgtagaacaggaagatctagatggagagatgtttgtcgaaatttcatgagacgttatcaatcccgagttacacaaggtcttgttgctggagaaacagcacaacaaatttgtgaagacttaaga

SEQ ID NO: 32962 - DNA, 225 bp, synthetic construct
  misc_feature 1..225: note = Description of Artificial Sequence: Synthetic coding sequence
  source 1..225: mol_type = other DNA
atggggagagactaccgcacttgcctgacaatcgttcagaaactcaaaaagatggtcgataagcctacgcaacgttcggtgtctaacgcagccacgagagtttgccgaactggacgaagtcgttggcgcgatgtttgtcgcaatttcatgcggagatatcagtccagagtcactcagggcctcgtcgctggggaaacagcccagcagatttgcgaagatctccgt

SEQ ID NO: 32963 - DNA, 288 bp, synthetic construct
  misc_feature 1..288: note = Description of Artificial Sequence: Synthetic coding sequence
  source 1..288: mol_type = other DNA
atggccacttgggccctgctcctgctcgcagcaatgcttctgggaaaccctgggctggtgttcagcggcagggactaccgtacctgtctgactatcgtccaaaagctgaaaaagatggtcgataagcctacccaacgctccgtgtccaatgccgcaacgcgggtgtgcagaaccggaaggtcccgatggcgagacgtgtgtagaaactttatgcgtagataccaatcgcgcgtcactcagggtcttgtggcgggagaaaccgcccagcaaatatgcgaggatcttaga

SEQ ID NO: 32964 - DNA, 288 bp, synthetic construct
  misc_feature 1..288: note = Description of Artificial Sequence: Synthetic coding sequence
  source 1..288: mol_type = other DNA
atggccacgtgggcgctgctgctgcttgccgccatgttgctcgggaaccctggtctggttttcagtggacgcgactacagaacttgtctgactatcgtacagaaactcaagaagatggtggacaagccgacccagagatccgtttcaaatgcagcgacccgggtgtgccgtaccggccgatcgcggtggcgcgatgtctgccggaactttatgcgccgctaccagagccgcgtgacccagggactggtggccggagagactgctcaacagatctgcgaagatttgaga

SEQ ID NO: 32965 - DNA, 288 bp, synthetic construct
  misc_feature 1..288: note = Description of Artificial Sequence: Synthetic coding sequence
  source 1..288: mol_type = other DNA
atggctacgtgggccctgctgctcttggcagcaatgcttctgggcaatccgggactcgtgtttagcggtcgcgactaccgcacttgcctcaccatcgtccagaagctcaagaaaatggtggataagcccacccagagatcggtttccaatgcagccactagggtgtgccgcactggccgctcaagatggcgggacgtctgcagaaatttcatgaggaggtaccaaagcagggttacgcagggactcgtggctggggaaactgctcagcagatctgcgaggacctgcgg

SEQ ID NO: 32966 - DNA, 288 bp, synthetic construct
  misc_feature 1..288: note = Description of Artificial Sequence: Synthetic coding sequence
  source 1..288: mol_type = other DNA
atggccacttgggcacttctgctgctcgcagctatgctcctcgggaatccgggcctcgtgttcagtgggcgggattaccgcacttgcctgactatcgtgcagaagttgaagaaaatggtggacaagccgactcagcggtcggtgtccaacgccgccactcgcgtgtgccggaccggacgcagccgctggagggatgtgtgccggaactttatgcggcggtaccaatcgagggtgacccagggcctggtcgccggagaaaccgcacaacagatctgcgaggacctgcgc

SEQ ID NO: 32967 - DNA, 288 bp, synthetic construct
  misc_feature 1..288: note = Description of Artificial Sequence: Synthetic coding sequence
  source 1..288: mol_type = other DNA
atggccacctgggccttattgctgctcgctgcaatgctgctgggtaacccgggccttgtttttagcggaagggattatcggacatgcctcaccatcgtacaaaaactcaaaaagatggtcgataaacccacccagcgctcggtgtccaacgctgccacccgggtctgtcgcactggacggtccagatggagggacgtgtgccgtaattttatgcgcaggtaccagtctcgcgtgacccagggcttggtagccggcgagacagcacagcagatctgcgaggacttgcga

SEQ ID NO: 32968 - DNA, 288 bp, synthetic construct
  misc_feature 1..288: note = Description of Artificial Sequence: Synthetic coding sequence
  source 1..288: mol_type = other DNA
atggctacctgggcccttcttttgctggctgccatgctcctaggcaaccctggcctcgttttttcgggaagagactaccgcacctgtctcacaattgttcagaagctgaaaaagatggtggataaacccactcagaggtccgtgagcaatgctgctacgagggtctgcagaaccgggcgcagcaggtggagggacgtttgtcggaactttatgcgcagataccagtccagggtaacccagggactcgttgcaggggagacagcgcagcagatctgtgaagatttgcgc

SEQ ID NO: 32969 - DNA, 288 bp, synthetic construct
  misc_feature 1..288: note = Description of Artificial Sequence: Synthetic coding sequence
  source 1..288: mol_type = other DNA
atggcaacctgggcgctgctgctgctggcggccatgctgctgggcaacccggggctggtgttctcgggccgtgactaccggacctgccttactatcgtgcagaaactcaagaaaatggtggataagcctacccaacgcagcgtctcaaacgccgcaacgcgggtgtgcagaaccgggcgctcaagatggagggatgtgtgcaggaactttatgcgccgctaccagtcgcgggtgacccaagggctcgtggcgggagaaaccgcacagcaaatctgcgaggatctgaga

SEQ ID NO: 32970 - DNA, 288 bp, synthetic construct
  misc_feature 1..288: note = Description of Artificial Sequence: Synthetic coding sequence
  source 1..288: mol_type = other DNA
atggcgacctgggcacttttgctcctggcagcaatgctgctgggaaaccccggattggtattcagcggtagagactaccggacttgcctcaccatcgtgcaaaaactcaaaaagatggttgataagccgactcagcgttcggtgtccaacgccgccacgagagtgtgcagaactggccgcagcaggtggagagacgtgtgtcggaatttcatgcggcggtaccagtctagggtgacccaagggctcgtggcaggggaaactgcgcaacagatttgcgaggacctgaga

SEQ ID NO: 32971 - DNA, 288 bp, synthetic construct
  misc_feature 1..288: note = Description of Artificial Sequence: Synthetic coding sequence
  source 1..288: mol_type = other DNA
atggctacgtgggcactgttgcttctggcagctatgcttcttggtaatcctggcttagtgttttccggcagggattaccggacgtgtctgacgatagttcagaaattaaaaaagatggtagacaaaccgacgcagcgatctgtgtccaatgcggcaacgcgcgtatgccgcacaggaagaagtcgctggcgtgacgtgtgccgaaacttcatgagacggtaccagtctagagtaactcaaggactggtcgcgggagaaacggcccaacagatttgcgaggatttacgc

SEQ ID NO: 32972 - DNA, 288 bp, synthetic construct
  misc_feature 1..288: note = Description of Artificial Sequence: Synthetic coding sequence
  source 1..288: mol_type = other DNA
atggcaacgtgggccctgttgctgttggcagccatgctgttgggtaacccaggactcgtattttccgggagggactaccggacgtgcctgacgatcgttcagaagctcaagaagatggtggacaagcctacccagcgcagtgtcagtaatgcagcaacccgggtttgccgcaccggccgctctcgatggagagatgtgtgcaggaatttcatgaggcgctatcagtcccgcgtgacccagggtttggtggcaggcgagactgcccagcagatatgcgaggacttacgg

SEQ ID NO: 32973 - DNA, 288 bp, synthetic construct
  misc_feature 1..288: note = Description of Artificial Sequence: Synthetic coding sequence
  source 1..288: mol_type = other DNA
atggctacctgggctctgttactactcgctgccatgttattggggaaccctggcctcgtgttttccgggcgtgactacaggacatgtctgaccatcgttcagaaactcaagaagatggtggataagcccacccaacggagcgtatctaatgccgctactcgggtctgcagaacaggccgctctcggtggagagatgtgtgtcggaactttatgagacgctaccagtcaagagttacgcagggactcgtcgcgggggaaacagcccagcagatttgcgaggatcttcgg

SEQ ID NO: 32974 - DNA, 288 bp, synthetic construct
  misc_feature 1..288: note = Description of Artificial Sequence: Synthetic coding sequence
  source 1..288: mol_type = other DNA
atggcgacgtgggcactcttgctgcttgccgcaatgttgctgggtaacccaggacttgtgttttcgggaagagactaccgaacttgtctcaccattgtccagaaactcaagaagatggtggacaagcctactcaacgttccgtttcgaacgcagccacccgtgtgtgccgaactggcaggtctaggtggcgcgatgtgtgtcggaatttcatgagaaggtatcagtcccgagtcacccagggccttgtggcaggagagactgcgcaacaaatctgtgaagatctccgg

SEQ ID NO: 32975 - DNA, 288 bp, synthetic construct
  misc_feature 1..288: note = Description of Artificial Sequence: Synthetic coding sequence
  source 1..288: mol_type = other DNA
atggcgacttgggcgttgctcctgcttgccgcgatgctgcttggcaaccccggactcgtgttcagcggtcgggattaccgtacttgcctcaccatcgtgcaaaagttgaaaaagatggtggacaagccaactcagcggtcagtctccaatgccgcaactcgagtgtgcaggaccggcaggtcgagatggcgcgacgtctgccggaactttatgcgccggtaccagtcgagagtgacccagggactggtggcgggggaaactgcccaacagatctgtgaggatctccgg

SEQ ID NO: 32976 - DNA, 288 bp, synthetic construct
  misc_feature 1..288: note = Description of Artificial Sequence: Synthetic coding sequence
  source 1..288: mol_type = other DNA
atggccacctgggcattgctgcttctcgccgccatgctactcggtaaccccgggctcgtgttctcaggtagggactacagaacttgtctgactattgtgcagaagctcaaaaaaatggtcgataagccaacgcagcgatcagtgtcgaacgctgcaactcgagtttgtaggaccgggaggagcagatggcgggacgtttgtagaaacttcatgaggcgttaccagagccgtgttacacaagggctggtggctggggagacagcacagcagatatgtgaagacctgagg

SEQ ID NO: 32977 - DNA, 288 bp, synthetic construct
  misc_feature 1..288: note = Description of Artificial Sequence: Synthetic coding sequence
  source 1..288: mol_type = other DNA
atggcgacttgggcattgctcctgttggctgctatgctgctagggaaccctggactcgttttctccggaagggattataggacctgtttaactattgtccaaaaactcaagaaaatggtggacaaaccgacacaacggtctgtttccaatgccgcgacccgcgtttgtagaactggacgttctcggtggcgtgacgtgtgtagaaattttatgagacgataccaatctagagttacgcaaggattggtggctggagaaaccgcgcaacaaatctgtgaagatctacgt

SEQ ID NO: 32978 - DNA, 288 bp, synthetic construct
  misc_feature 1..288: note = Description of Artificial Sequence: Synthetic coding sequence
  source 1..288: mol_type = other DNA
atggcgacgtgggcacttttattgctggcggccatgctgttggggaacccgggtttggtgttcagcggccgcgactataggacctgcttaaccatagtccagaagctcaagaaaatggttgacaaaccaacgcaacgatctgtcagcaacgccgccacccgcgtgtgcaggactggcagatcgcgctggcgcgacgtctgtcgaaactttatgcgccgttaccagagccgggtgactcagggccttgtagccggagagactgcgcagcagatatgcgaagatctgaga

SEQ ID NO: 32979 - DNA, 288 bp, synthetic construct
  misc_feature 1..288: note = Description of Artificial Sequence: Synthetic coding sequence
  source 1..288: mol_type = other DNA
atggcaacctgggccctcctgctgctcgctgcaatgcttctgggtaatccaggtttggtcttttcgggtcgggattaccgaacttgtctgactattgtccaaaagctgaagaaaatggtggacaaaccaacccagagatccgtcagcaacgcagccacccgggtgtgtagaactggaagatccaggtggcgcgatgtgtgtagaaactttatgcgacgctaccagtccagagtcacccaaggccttgtggcaggagaaactgcacagcagatctgcgaggaccttcgc

SEQ ID NO: 32980 - DNA, 288 bp, synthetic construct
  misc_feature 1..288: note = Description of Artificial Sequence: Synthetic coding sequence
  source 1..288: mol_type = other DNA
atggccacttgggcactgctactgctggcagccatgctgcttggtaatcctggattggttttttcaggaagagactaccgcacatgcctcactatcgtacagaaactgaagaagatggtggacaagccgactcaaaggtcagtttcaaacgctgctacgcgcgtttgtcgcacaggacggagtcggtggcgcgacgtgtgtcgaaatttcatgcggcgctaccaaagccgagtgacccagggcctcgtggctggtgaaactgcgcagcagatctgtgaggaccttcgg

SEQ ID NO: 32981 - DNA, 288 bp, synthetic construct
  misc_feature 1..288: note = Description of Artificial Sequence: Synthetic coding sequence
  source 1..288: mol_type = other DNA
atggccacatgggcactactgttgctggcggcaatgctccttggcaatccaggattggtgttctctggacgggactaccgcacatgtctgactatcgtgcagaaattgaaaaaaatggtcgataagcctactcagcgatcagttagcaatgcagcgaccagagtttgtaggactggtcgcagtcgctggagggatgtctgtcggaacttcatgcgccggtaccagagccgagtgactcaggggctggtcgcgggggaaactgctcaacaaatttgtgaggatttgcgt

SEQ ID NO: 32982 - DNA, 288 bp, synthetic construct
  misc_feature 1..288: note = Description of Artificial Sequence: Synthetic coding sequence
  source 1..288: mol_type = other DNA
atggctacctgggcactgctcctgctcgcagcaatgctgcttggaaaccccggcttggtgttcagcggacgggactacagaacttgtctgactattgtgcagaagctgaagaagatggtggataagccaacccaaaggtcggtgtcgaacgccgcaacccgtgtgtgtcgcacgggccgttcccgttggcgcgatgtgtgccgcaactttatgaggagataccagtcacgggtcactcaaggtttggtggccggagaaactgcccagcaaatttgtgaggatctgaga

SEQ ID NO: 32983 - DNA, 288 bp, synthetic construct
  misc_feature 1..288: note = Description of Artificial Sequence: Synthetic coding sequence
  source 1..288: mol_type = other DNA
atggccacatgggcactcctcctcctggccgctatgctgctcggtaatccaggactcgttttttctggcagagactacaggacatgtctcaccattgtacaaaagctgaagaagatggtggataaaccgacccagaggtcggttagtaatgcagcgaccagggtgtgccgcaccggtcgaagtagatggcgcgatgtatgccgtaatttcatgaggagataccagtctcgcgtgacacagggcctggtggccggcgagaccgcccagcagatatgcgaagacttgcga

SEQ ID NO: 32984 - DNA, 288 bp, synthetic construct
  misc_feature 1..288: note = Description of Artificial Sequence: Synthetic coding sequence
  source 1..288: mol_type = other DNA
atggcaacttgggctctactgctgctcgccgctatgttgttaggcaatccaggcttggttttctccggaagagattataggacttgtctgactattgtccagaaattgaagaaaatggtggataaaccaacccagcgttccgtgtcaaacgccgctacccgtgtctgcagaactgggcgatcaaggtggcgagacgtgtgtaggaatttcatgagaaggtaccaaagtagagtgacccaagggcttgtggccggagagaccgcccaacagatttgcgaagatttgcgc

SEQ ID NO: 32985 - DNA, 288 bp, synthetic construct
  misc_feature 1..288: note = Description of Artificial Sequence: Synthetic coding sequence
  source 1..288: mol_type = other DNA
atggctacatgggcactcctgttacttgcagccatgctgcttggcaatcctgggctggtcttcagtggaagggactacagaacatgcttgaccatagtgcaaaagctgaagaagatggtcgataaacccacccagcggtccgtctccaatgcagctacacgtgtgtgtcgaacggggagatcccgatggagagacgtctgtcgtaattttatgcgcaggtatcagtcaagagtgacgcagggactagtcgcgggagaaaccgcacagcagatctgcgaagacttgagg

SEQ ID NO: 32986 - DNA, 288 bp, synthetic construct
  misc_feature 1..288: note = Description of Artificial Sequence: Synthetic coding sequence
  source 1..288: mol_type = other DNA
atggccacctgggccctgctcctgcttgccgctatgctcttgggtaaccccgggctggtctttagcggccgtgactaccggacctgccttactatcgttcagaagctgaagaagatggtcgataaaccgacgcaaagatccgtgtcgaacgcagctactcgagtgtgcagaacgggacggtcccgctggagggacgtgtgtcgcaatttcatgaggcgataccagtctcgggtgacccagggattggtcgcgggggaaactgctcaacagatctgcgaggatctgcgc

SEQ ID NO: 32987 - DNA, 288 bp, synthetic construct
  misc_feature 1..288: note = Description of Artificial Sequence: Synthetic coding sequence
  source 1..288: mol_type = other DNA
atggctacatgggcactgctcctgctggctgctatgcttcttggtaatccaggcctggtgtttagcggacgagattacagaacctgtctgactatcgtccaaaagctgaaaaagatggtcgacaagccaactcagagaagcgtgtccaacgcagccacccgtgtgtgcaggaccgggaggtctcggtggagggatgtgtgcagaaatttcatgcgcaggtatcaaagcagggtgacacaaggcctggtagcgggcgagaccgcgcagcagatctgtgaggatctgaga

SEQ ID NO: 32988 - DNA, 288 bp, synthetic construct
  misc_feature 1..288: note = Description of Artificial Sequence: Synthetic coding sequence
  source 1..288: mol_type = other DNA
atggctacttgggccctgctactcctggccgctatgctgctgggaaaccccggtttggttttctcggggcgggactataggacctgtttgaccatcgtgcaaaaattaaagaaaatggttgataagcccacccagaggagtgtcagcaacgccgccacccgggtttgtcggactgggagatcaagatggagggacgtgtgccgcaatttcatgcgtcgctatcaaagccgggtaacccaggggctggtggccggggagacagcccagcaaatttgtgaagacctgaga

SEQ ID NO: 32989 - DNA, 288 bp, synthetic construct
  misc_feature 1..288: note = Description of Artificial Sequence: Synthetic coding sequence
  source 1..288: mol_type = other DNA
atggccacatgggcgttactgttacttgcggctatgcttttaggaaatcccggtttggtgttctcgggccgggattacagaacctgtctgaccatcgtgcagaaactgaaaaagatggtggataaaccaacccagcgtagcgtctcaaatgctgctacccgggtctgcaggacgggcagatcgcggtggagggatgtgtgccgaaattttatgcgtcggtatcagtcaagagtaacccaggggctcgtcgcgggcgaaaccgcacaacagatctgcgaggacttgaga

SEQ ID NO: 32990 - DNA, 288 bp, synthetic construct
  misc_feature 1..288: note = Description of Artificial Sequence: Synthetic coding sequence
  source 1..288: mol_type = other DNA
atggccacttgggccttgctactcctggcagccatgctgcttggaaacccaggtctggttttcagcggacgggactatagaacctgcctaacaatagtgcagaagttgaaaaagatggttgacaagcccacccaacggagcgtaagcaacgcagcaactcgtgtgtgtaggacgggaagatcacggtggcgcgacgtgtgcagaaactttatgcgacggtaccagagccgggtcactcaggggttggtcgccggagagactgcacagcagatttgcgaagatctcagg

SEQ ID NO: 32991 - DNA, 288 bp, synthetic construct
  misc_feature 1..288: note = Description of Artificial Sequence: Synthetic coding sequence
  source 1..288: mol_type = other DNA
atggcaacctgggccctcctcttgctggctgccatgttgctgggtaaccctggactggttttctctggcagggattacaggacctgcctcaccattgtgcagaagctgaaaaaaatggtcgacaagccgacccagcgatccgtgtccaatgcagcgactagggtgtgccgtaccggcagatctcgatggcgagacgtgtgcaggaactttatgcgtaggtatcagtcacgggtgactcagggcctcgtggcaggagagacggcacagcaaatctgtgaggacttgcga

SEQ ID NO: 32992 - DNA, 288 bp, synthetic construct
  misc_feature 1..288: note = Description of Artificial Sequence: Synthetic coding sequence
  source 1..288: mol_type = other DNA
atggcgacctgggccctgctgctgctggcagcgatgctgttgggaaatcctggtctggtgttttcggggcgcgattaccggacgtgtctgaccatcgtccagaaattgaaaaagatggtggataagccaacccagagatccgtttcaaacgccgctacccgggtgtgtcgtacgggaaggtcgcggtggcgggacgtgtgcagaaatttcatgcgccgctaccaatcccgggtgactcagggccttgtggccggggaaacggcgcagcaaatctgcgaggatcttaga

SEQ ID NO: 32993 - DNA, 288 bp, synthetic construct
  misc_feature 1..288: note = Description of Artificial Sequence: Synthetic coding sequence
  source 1..288: mol_type = other DNA
atggccacatgggcgttgttgctccttgcggccatgctgttagggaatccgggtctggtcttctcagggcgcgattaccgtacttgcctgactatcgtacaaaaactaaagaagatggttgataagcctacacaacgttctgtctccaatgcggccactcgagtttgtagaacgggccgttccagatggagagacgtctgccgcaacttcatgcgtcgttaccagtctagggttacgcaaggattggttgccggggaaactgcgcaacaaatttgtgaagaccttcgt

SEQ ID NO: 32994 - DNA, 288 bp, synthetic construct
  misc_feature 1..288: note = Description of Artificial Sequence: Synthetic coding sequence
  source 1..288: mol_type = other DNA
atggcaacttgggctctgctcttgctggcagccatgctcctgggtaaccccggactcgtattttctggtcgtgattaccgcacctgccttaccattgtgcagaagcttaaaaagatggtggataaacccacacagaggtcagtctctaatgccgctacccgcgtttgcagaacaggtagatctaggtggcgtgacgtctgccgcaactttatgaggagataccagtcccgcgtcactcagggtctggtggcaggagagacagctcagcaaatctgcgaagatctgcgt

SEQ ID NO: 32995 - DNA, 288 bp, synthetic construct
  misc_feature 1..288: note = Description of Artificial Sequence: Synthetic coding sequence
  source 1..288: mol_type = other DNA
atggcaacttgggctcttcttttgctcgcagcgatgctgctgggtaatcctgggctggtgttctctggtagagattacagaacctgtctgaccatcgtccaaaaactcaagaaaatggtcgacaagccgacccaacgatcggtcagcaatgcagccacgagggtgtgtagaactgggagatccagatggcgtgatgtctgccgaaactttatgcggcgataccagtcacgtgtgacccagggtttggtggcaggagaaaccgcccaacagatttgtgaagatctgcga

SEQ ID NO: 32996 - DNA, 288 bp, synthetic construct
  misc_feature 1..288: note = Description of Artificial Sequence: Synthetic coding sequence
  source 1..288: mol_type = other DNA
atggcaacttgggcactgctcttgctggccgccatgttgctcggaaaccctggcctcgtgttttctggccgggattaccggacctgtcttacaattgtacaaaagctgaagaagatggtggacaagccaacgcagagatctgtgtccaacgccgctacgcgggtttgcagaacggggcgcagccgatggcgcgatgtttgccgaaatttcatgagacgctaccagagcagagtgacacagggtctggtggctggagaaacggcccagcaaatatgtgaggacctgaga

SEQ ID NO: 32997 - DNA, 288 bp, synthetic construct
  misc_feature 1..288: note = Description of Artificial Sequence: Synthetic coding sequence
  source 1..288: mol_type = other DNA
atggccacctgggccctgctcctgctggccgccatgctccttgggaatccgggccttgtgttctcgggacgcgactaccgcacctgcctcactatcgtgcagaagttgaagaagatggtggacaagcctacccagagatcggtgagcaacgccgccaccagagtgtgccggaccggcagatcgcgctggagagacgtgtgccgcaacttcatgcgacgctaccaatccagggtgacgcaaggactcgtggcgggcgaaacggctcaacagatctgcgaagatctgcgc

SEQ ID NO: 32998 - DNA, 288 bp, synthetic construct
  misc_feature 1..288: note = Description of Artificial Sequence: Synthetic coding sequence
  source 1..288: mol_type = other DNA
atggcgacttgggccttgctgctgctggcagcaatgctgctcggtaatcctggtcttgtcttttcgggacgggattacagaacttgcttgaccatcgtgcagaaactgaaaaagatggtcgataagcctacccaacgttcggtgtctaatgcagcaactcgggtttgccgcacgggccgctcaaggtggagagacgtgtgtaggaacttcatgaggcgctaccaatcgagagtgacccaaggactcgtggcaggagaaactgcacaacagatttgtgaagatctccgg

SEQ ID NO: 32999 - DNA, 288 bp, synthetic construct
  misc_feature 1..288: note = Description of Artificial Sequence: Synthetic coding sequence
  source 1..288: mol_type = other DNA
atggcaacctgggcccttttactcttggccgcaatgttactgggaaatcctggcttagtattctcggggagggactaccgcacatgtctcactatcgtgcaaaaactaaagaagatggtggacaagccaacgcagcgatccgtgtcaaacgccgccacacgtgtgtgccgcactggtcgctcgcgctggagggacgtttgccggaactttatgaggcggtaccagagccgggttacacagggtctggtggcgggcgagaccgctcagcagatctgcgaggacctccga

SEQ ID NO: 33000 - DNA, 288 bp, synthetic construct
  misc_feature 1..288: note = Description of Artificial Sequence: Synthetic coding sequence
  source 1..288: mol_type = other DNA
atggccacttgggctctgctgctcctggcggctatgctgctgggcaaccctggactcgtgttcagcggccgggattaccgcacctgcctgaccatcgtgcaaaagctgaagaagatggttgataaacctacccagcgctcagtgagcaatgcagcaacgcgggtgtgccgcaccggaagatcccggtggagagacgtgtgtcggaacttcatgagacggtaccaatcaagagtgactcagggtctggtcgcgggggaaaccgcacagcagatctgcgaggacctgcgg

SEQ ID NO: 33001 - DNA, 288 bp, synthetic construct
  misc_feature 1..288: note = Description of Artificial Sequence: Synthetic coding sequence
  source 1..288: mol_type = other DNA
atggctacctgggctttgttgctgctcgcagcgatgctccttggtaacccaggtcttgtattctccggacgtgactatcgaacttgccttactattgtgcaaaagctaaaaaagatggtggataagccaacacagcggtccgtttccaatgcagccactcgtgtttgtaggaccgggaggtccaggtggagggatgtttgtcgtaatttcatgcgtaggtaccagtccagggtaacccagggtttggttgccggagaaactgctcaacagatctgtgaagacctccga

SEQ ID NO: 33002 - DNA, 288 bp, synthetic construct
  misc_feature 1..288: note = Description of Artificial Sequence: Synthetic coding sequence
  source 1..288: mol_type = other DNA
atggcaacatgggcacttctgttacttgctgcaatgctacttggaaatccagggctagtgttttcagggcgggattacaggacttgtctcactatcgtccaaaaattaaagaaaatggtcgacaaacccacacagcggagtgtgtctaacgcagctacacgcgtatgtagaacagggaggtccagatggagggatgtttgtagaaattttatgcgtaggtaccagtctcgggtcacacagggactggtagcaggagaaacagctcagcagatctgcgaggatttaaga

SEQ ID NO: 33003 - DNA, 288 bp, synthetic construct
  misc_feature 1..288: note = Description of Artificial Sequence: Synthetic coding sequence
  source 1..288: mol_type = other DNA
atggctacctgggcactccttctgctggccgccatgctcctcggtaatccagggctggtgttttccgggagggactaccggacgtgcctgaccatagtgcaaaaacttaagaagatggtggacaaacccactcaaagaagcgtcagcaacgccgcaacgagagtctgtcgaaccggtagaagcaggtggcgggatgtgtgtcggaacttcatgaggagataccagtcgagagtgacccaaggccttgtggctggagaaaccgcacaacaaatttgtgaagatctgcga

SEQ ID NO: 33004 - DNA, 288 bp, synthetic construct
  misc_feature 1..288: note = Description of Artificial Sequence: Synthetic coding sequence
  source 1..288: mol_type = other DNA
atggcaacttgggcactgctcctcttggccgccatgttactgggcaatcctggactagtgttctctgggagggactatagaacctgcttgacaattgtccagaagctgaaaaaaatggtggataagcctacgcagcggagcgtcagtaacgcggcaacgcgcgtctgccggacgggtagaagtcgctggcgtgatgtgtgccgcaattttatgcgacggtaccagtcgcgagtcacccagggcttggttgcgggcgagacggctcaacagatctgcgaggatcttcgg

SEQ ID NO: 33005 - DNA, 288 bp, synthetic construct
  misc_feature 1..288: note = Description of Artificial Sequence: Synthetic coding sequence
  source 1..288: mol_type = other DNA
atggccacctgggctctgctgctgctggcagcaatgctcctggggaatcccggcctggtcttcagcggccgggactaccgaacatgcctcacaatcgtgcagaaactcaagaaaatggtggacaagccaacgcaaagatcagtgagcaatgccgcaaccagggtgtgccggaccgggcgctcaaggtggcgtgatgtgtgccgaaatttcatgaggcggtaccagtcccgtgtcactcaaggactcgtcgctggcgagaccgcccaacaaatctgtgaagatctgagg

SEQ ID NO: 33006 - DNA, 288 bp, synthetic construct
  misc_feature 1..288: note = Description of Artificial Sequence: Synthetic coding sequence
  source 1..288: mol_type = other DNA
atggccacatgggcactgctgcttctggccgccatgctgctggggaatcctgggctggtcttcagcggtcgtgattataggacctgtctgacaatcgttcagaaattgaagaaaatggtggataaacccacccagagaagtgtttctaacgccgcgacccgagtgtgtcgtaccggacgttccaggtggcgggacgtatgccgaaactttatgcgcagatatcagagtcgtgtaacccagggcctagtggcaggcgagacagcccagcagatatgtgaggatctgcgg

SEQ ID NO: 33007 - DNA, 288 bp, synthetic construct
  misc_feature 1..288: note = Description of Artificial Sequence: Synthetic coding sequence
  source 1..288: mol_type = other DNA
atggcgacctgggccctgttgctactcgcagctatgctgctcggtaaccccggcctcgttttctcgggtcgtgactaccgtacctgcctgacgatcgtccagaaactaaagaagatggtcgacaagcccacacagcggtcggtgtccaacgctgctacgcgggtgtgccgcactggccgcagcagatggcgtgacgtttgtcgcaacttcatgcgtcgataccagagtcgtgttactcaggggttggtcgccggggagaccgcgcagcaaatttgtgaagacttgcgc

SEQ ID NO: 33008 - DNA, 288 bp, synthetic construct
  misc_feature 1..288: note = Description of Artificial Sequence: Synthetic coding sequence
  source 1..288: mol_type = other DNA
atggccacgtgggcattgcttctgcttgcagcaatgctcctgggcaatccggggctcgtgtttagcggtcgagactaccgtacctgtctcaccattgtgcaaaagctgaagaagatggtggataaacccacgcagaggtccgtctcgaatgcagcgactcgagtgtgtaggaccggacgcagccgctggagagatgtgtgccgaaatttcatgcgaagataccagtcacgggtcacccagggactggtggcgggcgaaaccgcccaacaaatatgcgaagatctgcgg

SEQ ID NO: 33009 - DNA, 288 bp, synthetic construct
  misc_feature 1..288: note = Description of Artificial Sequence: Synthetic coding sequence
  source 1..288: mol_type = other DNA
atggctacgtgggcgctgctgctgctcgctgctatgctgcttggaaaccctggtcttgtcttctcaggaagggattacaggacatgtctgaccatcgttcaaaaactgaagaaaatggtggacaagcccactcagaggagcgtcagcaacgccgctacaagggtgtgtaggacgggtaggagcagatggagagatgtctgcagaaacttcatgaggcgctaccaatcccgcgtgacccagggccttgttgcaggtgaaacggcacagcaaatctgtgaggatcttagg

SEQ ID NO: 33010 - DNA, 288 bp, synthetic construct
  misc_feature 1..288: note = Description of Artificial Sequence: Synthetic coding sequence
  source 1..288: mol_type = other DNA
atggctacgtgggccctgctgttactggcggctatgttgcttggtaatccaggtctggtgttttcaggacgggactaccgaacttgtcttaccatcgttcagaaactgaaaaagatggtagataagccgacccagcgatccgtctcaaatgctgccactcgcgtgtgcagaactggccgcagccggtggagggacgtttgtagaaactttatgcgcagataccaaagcagagtgacacagggtctggtggctggtgagaccgcgcagcagatctgcgaagatctgaga

SEQ ID NO: 33011 - DNA, 288 bp, synthetic construct
  misc_feature 1..288: note = Description of Artificial Sequence: Synthetic coding sequence
  source 1..288: mol_type = other DNA
atggcaacctgggcactgctgttattagccgccatgctgctcggcaaccctgggctcgtctttagcggacgagactataggacctgcctgacaattgttcagaagctgaagaagatggtcgataagcctacacagaggagcgtcagtaacgcggcaacacgggtatgtagaacagggagaagtcggtggagagatgtctgccgcaattttatgaggagataccagtctcgggtgacccaggggcttgttgcaggcgagacagcccaacagatttgtgaggatttgcgc

SEQ ID NO: 33012 - DNA, 288 bp, synthetic construct
  misc_feature 1..288: note = Description of Artificial Sequence: Synthetic coding sequence
  source 1..288: mol_type = other DNA
atggctacctgggctctcctgctccttgcagcaatgctgctaggtaacccaggactggttttctcaggcagggactatcgcacttgcttgaccatagtgcagaagctgaaaaagatggtggataaaccaacccagaggagcgttagtaatgctgccacccgggtctgccggaccgggcgatcccgatggcgcgacgtgtgccggaattttatgcgccggtatcaaagtcgggtaacacagggtctggtggccggggaaacggcccagcaaatttgtgaggaccttcgc

SEQ ID NO: 33013 - DNA, 288 bp, synthetic construct
  misc_feature 1..288: note = Description of Artificial Sequence: Synthetic coding sequence
  source 1..288: mol_type = other DNA
atggccacgtgggcactgctcttgctagccgcaatgctgctcggcaaccctggtctcgtgttttccgggagagactaccgcacctgcttaaccattgttcagaaactaaagaaaatggtggataagcccacgcagagatccgtaagcaacgcagccacaagggtttgcagaacaggacgcagtcgttggcgtgacgtctgcagaaacttcatgcgccggtaccaatcccgagtgacgcaggggctggtggcaggcgagacggcccagcagatttgcgaggatttgaga

SEQ ID NO: 33014 - DNA, 288 bp, synthetic construct
  misc_feature 1..288: note = Description of Artificial Sequence: Synthetic coding sequence
  source 1..288: mol_type = other DNA
atggcaacctgggccctgctgctacttgctgccatgctcctgggcaatcccggccttgtgttctccgggcgggattacaggacatgtcttacaatcgtccaaaaactcaaaaaaatggtggataaacctacacagcggtctgtatcgaatgctgcaacacgtgtctgtcggaccgggagatctcgatggagggatgtatgccgcaacttcatgagaaggtaccagtcgcgagtgacccagggcctcgttgctggcgaaaccgctcagcagatttgtgaggacctgagg

SEQ ID NO: 33015 - DNA, 288 bp, synthetic construct
  misc_feature 1..288: note = Description of Artificial Sequence: Synthetic coding sequence
  source 1..288: mol_type = other DNA
atggcgacttgggcgctcctgcttctggccgccatgctcctgggtaacccaggactggtgttctcaggaagggactaccgcacttgcctgaccatcgtccagaaacttaagaagatggtcgataaacctactcagcgctctgtctccaatgcggcaacccgcgtctgtcgcaccggacggagccggtggcgagacgtgtgtcgcaacttcatgcgccggtatcagagccgcgtgacccaaggactggtggcaggcgagactgcgcagcaaatctgcgaggatttgcga

SEQ ID NO: 33016 - DNA, 288 bp, synthetic construct
  misc_feature 1..288: note = Description of Artificial Sequence: Synthetic coding sequence
  source 1..288: mol_type = other DNA
atggcgacatgggctctgctgcttctcgcggcgatgctcctcggcaatcccggcctggtgttttcgggacgggattaccgcacatgcctgactatcgtacagaagctgaaaaaaatggttgacaagccgactcagcggagcgtgagcaatgccgccacgcgcgtgtgtcgtacaggtcgcagccgatggcgcgatgtgtgtcgaaacttcatgcgccgttaccaatcacgggtgacgcagggcctggtggccggtgagacagctcagcaaatttgcgaggatctgaga

SEQ ID NO: 33017 - DNA, 288 bp, synthetic construct
  misc_feature 1..288: note = Description of Artificial Sequence: Synthetic coding sequence
  source 1..288: mol_type = other DNA
atggcaacatgggcccttctccttctggctgcgatgcttctggggaatcctggacttgtcttttccggtagggactatagaacatgcctgacaatcgtgcagaaactgaagaagatggtcgacaagccaacacagcggtcagtctccaacgccgcaactcgggtgtgccgtactggtaggagtcgctggagagatgtctgcaggaacttcatgcgcagataccagagtcgagttactcagggcctggtggccggggagaccgcgcaacagatatgtgaggacttgcga

SEQ ID NO: 33018 - DNA, 288 bp, synthetic construct
  misc_feature 1..288: note = Description of Artificial Sequence: Synthetic coding sequence
  source 1..288: mol_type = other DNA
atggcaacctgggcgctgttactcctagcagctatgttattgggcaatcccgggctagtctttagtggtagagattatcgtacgtgcctgacaattgtccaaaagttaaagaaaatggtggacaagcccacccagcgctccgtgtcaaatgcagcaactcgggtttgtagaaccggccgctcccgctggagagacgtgtgcaggaactttatgcggcgttatcagagtagagttacccaagggttagtggccggagaaactgctcagcagatatgcgaagacttgaga

SEQ ID NO: 33019 - DNA, 288 bp, synthetic construct
  misc_feature 1..288: note = Description of Artificial Sequence: Synthetic coding sequence
  source 1..288: mol_type = other DNA
atggcaacttgggctttgctgctgcttgcggcaatgcttctcggtaaccctggacttgtcttttcgggtagagactacagaacttgcctgaccatcgtgcaaaagctgaaaaagatggtcgacaagcctacccagcgctcagtttctaacgcagcaaccagagtctgtcgcaccggtcgatcgagatggcgcgatgtgtgtagaaatttcatgcgccggtaccaatcgagggtgactcagggtctggtggcgggtgaaactgcacagcaaatttgtgaagatctcaga

SEQ ID NO: 33020 - DNA, 288 bp, synthetic construct
  misc_feature 1..288: note = Description of Artificial Sequence: Synthetic coding sequence
  source 1..288: mol_type = other DNA
atggccacctgggctttgcttcttttggccgcaatgctcttgggaaaccctggactggttttttcgggtagagattaccgcacttgtctgaccattgtccaaaaactcaagaagatggtggataagccaactcagcggtccgtgtcgaacgctgcgacccgcgtttgccgcactgggcgatcacggtggagggatgtgtgtcgaaatttcatgcgtaggtaccaaagccgagtgacccaaggccttgtcgcgggtgaaacggcacagcagatctgtgaggaccttcgc

SEQ ID NO: 33021 - DNA, 288 bp, synthetic construct
  misc_feature 1..288: note = Description of Artificial Sequence: Synthetic coding sequence
  source 1..288: mol_type = other DNA
atggctacttgggctttattacttttagctgcaatgcttcttggtaatccaggacttgttttttctggtcgtgattatagaacatgtttaactattgttcaaaaattaaagaaaatggtagataaacctacacaaagatcagtttcaaatgcagcaactagagtgtgtcgtactggacgatctagatggagagatgtttgtcgtaactttatgagaagatatcaatcaagagtcacacaaggattagttgcaggagaaacagcacaacaaatttgtgaagatcttaga

SEQ ID NO: 33022 - DNA, 288 bp, synthetic construct
  misc_feature 1..288: note = Description of Artificial Sequence: Synthetic coding sequence
  source 1..288: mol_type = other DNA
atggcaacctgggcccttcttttgctcgcagccatgctgttgggaaacccaggtcttgtcttttcaggtcgggattacaggacctgtcttactatcgtgcagaagctgaaaaagatggtggacaaacctactcaaagatcggtaagtaatgccgctacgagggtctgtcgcaccggccgctccagatggcgggatgtgtgccggaactttatgcgcagataccagtcgcgtgtcactcaaggactcgtggctggagaaaccgcgcagcaaatttgtgaggatttgaga

SEQ ID NO: 33023 - DNA, 288 bp, synthetic construct
  misc_feature 1..288: note = Description of Artificial Sequence: Synthetic coding sequence
  source 1..288: mol_type = other DNA
atggcaacctgggcacttctccttctggcagcgatgttgctgggcaaccctgggcttgtcttttcaggtcgtgattacagaacttgtcttactatcgtacagaagctcaagaagatggtggataaaccgacccaacgctctgtctcgaatgccgctacccgggtgtgccgaaccggaagatcacgttggagagacgtctgtagaaacttcatgagaagataccagtccagggtgacgcagggcttggtagccggagagacggcacaacaaatttgcgaagatctcaga

SEQ ID NO: 33024 - DNA, 288 bp, synthetic construct
  misc_feature 1..288: note = Description of Artificial Sequence: Synthetic coding sequence
  source 1..288: mol_type = other DNA
atggccacctgggcgttgcttctgctcgctgcgatgctcctgggtaatccgggcctcgttttcagcggacgcgactaccggacctgcctcaccatcgtgcagaagttgaagaaaatggtggataagccgactcaacggagcgtttcgaatgcggcgactcgggtgtgcagaaccggaagatcgaggtggcgcgatgtgtgccgcaatttcatgcggagataccagtccagggtgacgcaaggcctggtggccggtgagacggcccagcagatctgcgaggacctgcgc

SEQ ID NO: 33025 - DNA, 288 bp, synthetic construct
  misc_feature 1..288: note = Description of Artificial Sequence: Synthetic coding sequence
  source 1..288: mol_type = other DNA
atggccacctgggcactgctcctcctcgcggccatgctgctgggaaacccgggcctggtgttctcgggacgagactaccgtacctgcttgaccatcgtgcagaagctcaaaaagatggtggataaaccaactcagcgctcggtttccaacgccgctacgcgcgtgtgcaggactggacggtcaaggtggcgggacgtctgcaggaatttcatgcgtcgctaccagtctcgggtgactcaaggattggtcgccggggaaaccgcccaacagatctgtgaggatctgcgc

SEQ ID NO: 33026 - DNA, 288 bp, synthetic construct
  misc_feature 1..288: note = Description of Artificial Sequence: Synthetic coding sequence
  source 1..288: mol_type = other DNA
atggcaacttgggcactgcttcttttggcagcaatgcttctgggaaacccagggctggtgttttcgggtagggactataggacttgtctgaccattgtgcaaaagctcaagaagatggtggacaagccgacccagaggtcggtgtccaatgccgcgacccgagtctgccggaccggaagaagccggtggagagacgtgtgtagaaacttcatgagacgctaccagtccagagtcactcagggactggtggcaggggagactgcacagcaaatatgtgaagatctgcgg

SEQ ID NO: 33027 - DNA, 288 bp, synthetic construct
  misc_feature 1..288: note = Description of Artificial Sequence: Synthetic coding sequence
  source 1..288: mol_type = other DNA
atggcaacttgggctcttttgcttttggcagctatgctacttggaaaccctgggctggtgttttcagggcgagattataggacttgtcttacaattgtacagaagctaaaaaaaatggttgataaacctacacagcggtctgtatcaaacgccgctacaagggtttgtaggacagggcgctcacgttggagagatgtctgtcggaattttatgagacggtatcagtcacgggtgacacagggactagtggctggagaaactgcgcagcaaatatgtgaagatcttcga

SEQ ID NO: 33028 - DNA, 288 bp, synthetic construct
  misc_feature 1..288: note = Description of Artificial Sequence: Synthetic coding sequence
  source 1..288: mol_type = other DNA
atggcgacttgggccctcttgctcctcgcagcaatgctgcttggaaatccaggattggtcttttctggaagggactaccgtacctgcctgactatcgtccagaagctgaagaagatggtggacaaaccgactcagcgctccgtctccaacgctgccacccgagtgtgtagaaccggcagatcaagatggcgcgacgtatgcagaaacttcatgcgccgctaccagagtcgggtgacccaaggtctggtggccggggagacggcacagcaaatctgcgaagatctccgc

SEQ ID NO: 33029 - DNA, 288 bp, synthetic construct
  misc_feature 1..288: note = Description of Artificial Sequence: Synthetic coding sequence
  source 1..288: mol_type = other DNA
atggcaacctgggcccttttgctgctcgcggctatgctccttgggaacccgggactggtcttttcaggccgggattaccgcacgtgtctgactatcgtacagaagctgaagaaaatggtggacaagcctactcagcgctcggtgtccaacgccgccactagagtttgcaggaccggtcggagcagatggcgtgatgtctgccgcaatttcatgcgaaggtaccaatcgcgagtgacccagggcctggtggcaggagaaaccgcgcagcaaatctgcgaggacctcaga

SEQ ID NO: 33030 - DNA, 288 bp, synthetic construct; identical to SEQ ID NO: 33014
  misc_feature 1..288: note = Description of Artificial Sequence: Synthetic coding sequence
  source 1..288: mol_type = other DNA

SEQ ID NO: 33031 - DNA, 288 bp, synthetic construct
  misc_feature 1..288: note = Description of Artificial Sequence: Synthetic coding sequence
  source 1..288: mol_type = other DNA
atggctacttgggctctgctcctgcttgcggccatgcttctgggaaacccgggcctggtgttctccggtcgcgattacaggacctgtctgactatcgtgcaaaagctcaaaaagatggtcgacaagcctacgcaaaggtctgtgagcaatgccgccaccagagtgtgtcgcactggtaggtcccgctggagagacgtgtgccgcaatttcatgcggcggtaccagtcccgcgtgacccagggtcttgtggcaggggaaaccgcgcagcagatttgcgaggacctgcgg

SEQ ID NO: 33032 - DNA, 288 bp, synthetic construct
  misc_feature 1..288: note = Description of Artificial Sequence: Synthetic coding sequence
  source 1..288: mol_type = other DNA
atggcaacatgggcgctgctgcttctcgcagctatgttgcttggcaatccaggacttgtattcagcggccgcgattatcggacctgtttgaccatagtgcagaagctgaagaagatggtagacaagcccacccagaggtcagtgagcaatgccgccacccgtgtctgcaggactgggcgttcacggtggagagacgtatgccggaacttcatgaggagatatcagagcagagtaacacaggggttagtggcgggtgaaactgctcagcagatctgcgaagaccttaga

SEQ ID NO: 33033 - DNA, 288 bp, synthetic construct
  misc_feature 1..288: note = Description of Artificial Sequence: Synthetic coding sequence
  source 1..288: mol_type = other DNA
atggctacttgggccctgcttcttttagcggctatgttactcggcaaccctggactggtgttttctggtagggactacaggacttgtctgacgatcgtgcagaaactgaaaaaaatggtggataagccaacgcaaagatctgtttcaaacgctgccactcgcgtgtgtcgcaccggacgcagtcgctggcgcgacgtctgtcgcaactttatgagaagataccagagccgcgtgacccagggcctcgtggctggggagacagcgcagcagatttgcgaggatctgaga

SEQ ID NO: 33034 - DNA, 288 bp, synthetic construct
  misc_feature 1..288: note = Description of Artificial Sequence: Synthetic coding sequence
  source 1..288: mol_type = other DNA
atggctacctgggcacttctgctactcgcagccatgctgctgggaaatcctgggctagtgttcagtggacgggattaccgaacctgcctgacaatcgtgcagaagctgaagaaaatggtggacaaacccactcagcggagcgtgtcaaacgcagccacccgcgtgtgccggaccggacgctccagatggagagacgtttgcaggaactttatgaggcgttaccaatcccgggtgacacagggacttgtagccggcgaaaccgcacaacagatatgtgaagatttaaga

SEQ ID NO: 33035 - DNA, 288 bp, synthetic construct
  misc_feature 1..288: note = Description of Artificial Sequence: Synthetic coding sequence
  source 1..288: mol_type = other DNA
atggcgacctgggcactcctgctgctggcagccatgcttctggggaatccaggactggtgttttcaggacgggactaccgaacctgtctgaccatagtccagaagctgaagaagatggtcgataaacctactcagcgaagcgtgtcgaacgccgccactcgcgtgtgcagaactgggcgttcccgatggagggatgtgtgccgtaactttatgaggcggtaccaatcgcgggtcacccaaggacttgtggcgggagaaactgcacaacaaatttgcgaagatctgaga

SEQ ID NO: 33036 - DNA, 288 bp, synthetic construct
  misc_feature 1..288: note = Description of Artificial Sequence: Synthetic coding sequence
  source 1..288: mol_type = other DNA
atggccacgtgggcactgctgttgttggcagcgatgctgctgggtaatccgggcctggtgttctccggccgcgactacaggacgtgcttgacgatcgtgcaaaaattgaagaaaatggtggacaagcccactcaacgctctgtgtcgaatgccgccacccgggtgtgcagaacaggccgaagccgctggcgagatgtttgcaggaacttcatgcgccggtaccagagccgagtcacgcagggtctggttgcaggcgaaactgcgcagcagatctgtgaggacctacga

SEQ ID NO: 33037 - DNA, 288 bp, synthetic construct
  misc_feature 1..288: note = Description of Artificial Sequence: Synthetic coding sequence
  source 1..288: mol_type = other DNA
atggccacctgggcccttctcctgctggcagcaatgctcctgggaaacccgggactggtgttctcgggacgcgattacagaacctgcctcactatcgtgcagaagctgaagaaaatggttgataagccaacccagcggagcgtgtcgaacgctgcgactcgggtctgccgcactgggcgctcaagatggagggacgtgtgccggaattttatgaggcgataccaatcccgcgtgacccaaggcttggtcgcgggtgaaacggcccagcagatctgtgaggacctgcgg

SEQ ID NO: 33038 - DNA, 288 bp, synthetic construct
  misc_feature 1..288: note = Description of Artificial Sequence: Synthetic coding sequence
  source 1..288: mol_type = other DNA
atggcaacctgggccctgctgcttttggctgccatgctgttgggcaacccaggactcgtcttttcgggtagggactaccgcacttgtctcaccattgtccaaaagctgaagaaaatggtcgataagcctactcaacggtccgtcagcaacgcggccacccgcgtgtgtagaactggtcgcagccggtggagagacgtgtgtcggaactttatgcgccggtaccagtcgagagtgacccaaggactggtcgcaggagagacggcacaacagatctgtgaagatctgcgg

SEQ ID NO: 33039 - DNA, 288 bp, synthetic construct
  misc_feature 1..288: note = Description of Artificial Sequence: Synthetic coding sequence
  source 1..288: mol_type = other DNA
atggccacttgggcactgctgcttctggccgcgatgcttctcggcaatccagggctggtgttctctggcagagactaccgcacttgcctgacgatcgtgcaaaaactgaagaagatggtggacaaaccgacccagcggtcagtctccaacgcggcgacccgtgtgtgtcgcacgggacggtcccgctggcgggatgtctgtagaaacttcatgcgccgctaccagtcgcgggtgactcagggcctggtggctggagaaaccgcacaacaaatctgcgaggacctgcgc

SEQ ID NO: 33040 - DNA, 288 bp, synthetic construct
  misc_feature 1..288: note = Description of Artificial Sequence: Synthetic coding sequence
  source 1..288: mol_type = other DNA
atggccacatgggcactgctgctgctcgcggcgatgctgcttggtaacccaggccttgtgttctctggtcgagactataggacttgcctgaccatagttcaaaaactgaaaaaaatggtcgacaagcccacccagcgcagcgtgtcaaatgctgcaacaagggtttgccggacaggcagaagccggtggagggacgtgtgccgaaatttcatgcgaagatatcagtctcgcgtgactcaagggctggtcgcaggtgaaactgcccagcagatctgtgaagacctccgc

SEQ ID NO: 33041 - DNA, 288 bp, synthetic construct
  misc_feature 1..288: note = Description of Artificial Sequence: Synthetic coding sequence
  source 1..288: mol_type = other DNA
atggccacctgggccctgcttctgcttgcagcgatgctgctcgggaatccgggactggtgttctcgggaagagactaccgaacttgtctcaccatcgtgcagaagctgaagaagatggtcgacaaacccacccagcggagcgtgtccaatgcggccacgcgcgtctgtagaactggacggagccgttggcgcgacgtctgcaggaacttcatgcgcaggtatcagtcaagggtcacccagggattggtggctggcgaaaccgcacaacaaatctgcgaggatctgcgg

SEQ ID NO: 33042 - DNA, 288 bp, synthetic construct
  misc_feature 1..288: note = Description of Artificial Sequence: Synthetic coding sequence
  source 1..288: mol_type = other DNA
atggccacatgggctctgctattgttggcagccatgcttctgggcaacccaggcttagtgttttctgggcgggattacaggacatgtctgacgattgtgcagaagctgaaaaaaatggtcgacaagcctacacaacgctccgtgtccaacgccgccactcgtgtgtgtcgtacagggagatcaagatggagagatgtgtgtcggaactttatgcggcgctatcagagccgtgttacccaaggtctcgttgctggtgagacagcgcaacagatctgcgaagatctaagg

SEQ ID NO: 33043 - DNA, 288 bp, synthetic construct
  misc_feature 1..288: note = Description of Artificial Sequence: Synthetic coding sequence
  source 1..288: mol_type = other DNA
atggccacttgggcgttgctccttctggccgcaatgctgctggggaaccctggcctcgtgttctccgggcgggactacaggacctgtctcactatcgttcagaaactcaaaaaaatggtggacaagccgactcaaagaagcgtgagcaacgccgccacgcgggtttgtagaacaggacgctcacgatggcgagacgtctgccgcaattttatgcggcggtaccagagccgcgtgactcagggcctcgtcgcgggtgagaccgcccagcagatctgcgaggacttgaga

SEQ ID NO: 33044 - DNA, 288 bp, synthetic construct
  misc_feature 1..288: note = Description of Artificial Sequence: Synthetic coding sequence
  source 1..288: mol_type = other DNA
atggccacatgggccctgttgctgctggccgctatgctactgggtaatcccggcctcgtgttttccgggagggactaccggacttgtcttactatcgtacagaagcttaagaagatggtagacaagcctacgcagagatctgtaagtaatgccgctacccgcgtgtgtcggacaggacggagccgatggcgcgatgtgtgtcgcaattttatgagaaggtatcaaagccgggtgactcagggcttggtggcaggagagacagcacagcagatttgtgaggatctgcgg

SEQ ID NO: 33045 - DNA, 288 bp, synthetic construct
  misc_feature 1..288: note = Description of Artificial Sequence: Synthetic coding sequence
  source 1..288: mol_type = other DNA
atggccacatgggcactactgctactcgcggcaatgctcctgggaaatcctgggttagttttttctgggcgcgactacagaacatgtctgactattgtgcagaaactgaagaaaatggtggacaaacctacgcagcggtcggtgtcaaacgccgccactagggtgtgccgcaccggtcggagccgatggcgggacgtgtgtcgaaacttcatgcgaaggtaccagtctcgcgtgacccagggactggtggcaggggagactgcccaacagatatgcgaagacctgaga

SEQ ID NO: 33046 - DNA, 288 bp, synthetic construct
  misc_feature 1..288: note = Description of Artificial Sequence: Synthetic coding sequence
  source 1..288: mol_type = other DNA
atggcaacgtgggccctgcttcttcttgcagccatgctgctcggaaacccaggattggtgttttcaggtcgtgactatcgtacttgccttactatagtgcagaaactgaagaaaatggtcgataagcctacccaaagaagcgtgtccaacgcggcaactcgcgtgtgtcggaccggacggtcacgatggcgggacgtgtgtagaaatttcatgagacggtaccaatcacgggtcacgcaaggtctggtggcgggcgagactgcacaacaaatttgtgaagatttgcgc

SEQ ID NO: 33047 - DNA, 288 bp, synthetic construct
  misc_feature 1..288: note = Description of Artificial Sequence: Synthetic coding sequence
  source 1..288: mol_type = other DNA
atggcgacgtgggcgttactattattagcggcgatgctattaggtaatccgggtttagttttttcgggtcgagattatcgtacgtgtttaacgatagtacaaaaactaaaaaaaatggtagataaaccgacgcaacgatcggtatcgaatgcggcgacgcgtgtttgtcgaacgggtcgttcgcgttggcgagatgtatgtcgtaattttatgcgacgatatcaatcgcgtgttacgcaaggtctagttgcgggtgaaacggcgcaacaaatatgtgaagatttacga

SEQ ID NO: 33048 - DNA, 288 bp, synthetic construct
  misc_feature 1..288: note = Description of Artificial Sequence: Synthetic coding sequence
  source 1..288: mol_type = other DNA
atggccacctgggcacttttgctcctggctgccatgctgctcggaaatccgggccttgtgttttccggtcgggattatagaacctgtctcactattgtgcaaaagttgaagaagatggtcgataaacctacgcagcgctccgtgtccaacgctgcaactcgggtctgtcgaactgggagatcccggtggcgagacgtttgtcggaacttcatgagaaggtaccagtcacgggtgacccaaggactcgtggcaggtgagacggcgcaacagatctgcgaggacctccgc

SEQ ID NO: 33049 - DNA, 288 bp, synthetic construct
  misc_feature 1..288: note = Description of Artificial Sequence: Synthetic coding sequence
  source 1..288: mol_type = other DNA
atggccacatgggcactcctgctgctcgccgccatgttgctcgggaaccccggcttagtattctccggaagagattaccggacatgcctcaccatcgtccagaagctgaagaagatggtcgacaagcccactcagaggtccgtgtctaatgctgctactagggtctgcagaacaggaaggtctcggtggagagacgtgtgcagaaacttcatgaggcgatatcagtctcgagtgacacagggactggtggctggcgaaactgcacagcagatctgcgaggacctaaga

SEQ ID NO: 33050 - DNA, 2478 bp, synthetic construct
  misc_feature 1..2478: note = Description of Artificial Sequence: Synthetic coding sequence
  source 1..2478: mol_type = other DNA
atggagggagctgggggagctaatgacaagaagaagataagttctgaaagaagaaaggaaaaatctcgagacgctgcacgatccagacgcagcaaggaatccgaggtattctatgagttggctcaccaacttccactaccacacaacgtcagtagccatttagataaagcatcagtcatgagactgactatctcttacctgcgagtgaggaaactgctggatgcaggagacttggacatcgaagatgatatgaaagcgcaaatgaattgcttttacttgaaagctttagacggatttgtcatggtcttgaccgacgacggggacatgatctacattagcgataatgtcaacaagtacatggggctgacacagtttgaattgaccggccacagcgtatttgacttcacgcacccctgtgaccacgaagagatgcgagagatgcttacccataggaacggcctggtgaaaaaggggaaggagcaaaatacgcagcgcagcttcttcctacggatgaagtgtaccctcacctcaagaggcagaacaatgaacattaagagtgctacctggaaagtcttacattgcactgggcatatccacgtgtacgacacgaacagtaatcaaccgcagtgtggatacaagaagccgccaatgacctgtctggtcttaatctgtgaacccatccctcatccgagtaatatcgaaatcccactagacagtaaaaccttcctgtcgaggcactccctggatatgaagttcagttattgcgacgaaaggattaccgagcttatgggctatgagcccgaggaactgctggggaggtcaatttacgagtactaccatgccctggatagcgatcacctaacaaaaactcaccatgatatgttcactaaggggcaggtcacaactggacagtaccgaatgctagccaaaaggggcggctacgtgtgggtggagactcaggccaccgtcatctataatacaaagaactcccagccacagtgcatcgtgtgcgttaattatgtcgtaagtggcatcattcagcatgacctaattttctcgcttcagcagaccgagtgtgtgctcaaacccgttgagagttcagatatgaagatgacgcagcttttcactaaagttgaatccgaggatactagttccctattcgacaagctgaagaaggaacctgacgctctcactctgctcgctcctgctgctggagacacaattatttctctagatttcggatccaacgatactgaaaccgatgatcaacagttggaggaggtgccactatacaacgacgtgatgctcccttccccgaacgagaaactccagaatatcaacctggcaatgtctcccctgcccactgctgagacaccaaaaccgctgcgaagtagtgcagatccagctttaaatcaggaagtcgcccttaagctcgaaccgaacccagagtcactcgagctcagctttactatgccccaaattcaggaccagactccatctccaagcgacggatccacgaggcagtcgagtcccgaacccaattctccttcagagtactgcttttatgtcgatagcgatatggtcaatgagtttaaactcgagctcgtggagaagctgttcgccgaagataccgaggctaaaaacccattctccacacaagacaccgatcttgacctagaaatgctggctccatacattcccatggatgatgatttccagctgagatcgttcgaccaactgagcccacttgagtcatccagtgcgagccccgagagtgcctcaccgcaatctacagtgacggtttttcagcagacacagatacaggagcccacagcaaacgcgaccacaaccacagccaccaccgacgaacttaagactgttactaaagacaggatggaggatatcaaaatcctgatcgctagtccctcacccactcatatccacaaggagacaacatcggctaccagctccccttaccgggacacccagtccaggacggcaagtcccaacagagccggcaagggagtgatcgaacagacagagaagtcacatcctcgatcaccgaacgtcttaagcgtggcactcagccaaagaacgaccgtgcccgaggaggaactaaatcccaagatcttggctcttcaaaacgcccagcgaaaacgcaaaatggagcacgacgggagcctgttccaggcagtgggcatagggaccttgctccaacagccagacgaccacgcagcgaccactagcctctcctggaaaagggtgaagggatgtaagagctccgagcagaacggtatggagcagaaaactattatcttaatccccagtgatctagcatgtcggctgctgggccagtccatggacgaatccggcttacctcagctgactagctacgattgtgaggtcaatgcaccgatccagggatctcggaacctgctacagggcgaggaactcctaagagcactggaccaggtgaat

SEQ ID NO: 33051 - DNA, 2478 bp, synthetic construct
  misc_feature 1..2478: note = Description of Artificial Sequence: Synthetic coding sequence
  source 1..2478: mol_type = other DNA
atggagggtgctggtggggcgaacgacaagaaaaaaataagcagcgagcggagaaaggaaaagagccgggacgccgccagaagccgaaggagcaaagaatccgaggtcttttacgagctcgcccaccagctgccgctgccccacaacgtctcttcacatctggacaaggcgagcgtgatgcgtctgaccatctcctacctgcgcgtccggaagctgctcgatgcaggagacctggatattgaggatgacatgaaggcccagatgaactgcttttacctgaaggccctcgatggctttgttatggttttgacggacgatggcgatatgatctatatcagcgataatgttaacaaatatatgggactgacacagttcgaattgacgggccactccgtattcgatttcacccatccctgtgaccacgaagagatgcgggagatgctaactcatcgcaatggcctggtaaagaaagggaaagagcagaatactcaaagaagcttttttctgcgcatgaaatgtacgctcacatctcgaggccgcacgatgaacattaaaagcgctacatggaaggtgctgcactgtacaggacatatccacgtgtacgacaccaattcgaaccaaccgcaatgtggttataagaagccaccgatgacgtgcttagtgctcatctgtgagcccatcccccaccctagcaatattgagattcctcttgattccaagacatttctaagcagacactccctggacatgaagttctcctactgcgacgaacgtatcacagagctgatgggctatgaaccagaggagctcctgggccgtagcatctacgagtactaccatgcgctggacagtgatcatctaaccaagacgcaccatgatatgtttactaagggccaagttaccacgggccaataccgcatgctcgccaaacgaggcgggtatgtctgggtggagacccaagccacagtcatctacaataccaagaatagccaaccacagtgcatcgtgtgcgttaattatgtggtgagcggaatcattcagcacgatctgatttttagccttcagcaaaccgaatgcgtcctgaagccggtggaaagctccgatatgaagatgactcagctcttcacaaaggtcgagtcggaggacacttcgagcctgtttgacaaactcaagaaagagcccgacgccctgaccctgctggcgcccgcagccggcgatacgatcatatcactggatttcggatctaacgatacggagacagacgatcagcagctggaagaggtgccattgtacaatgacgttatgctgccatccccgaacgagaagcttcagaacattaacctggccatgtcaccgttacccacggcagagacaccgaaaccgctgcgatccagcgcggatccggccctcaaccaggaggtagcattgaaactcgagccgaacccggagtctctagagctaagtttcacgatgcctcaaatccaggatcagacaccttccccatccgacgggagcacccgccagtccagccccgagccgaactcgccatccgaatactgtttctacgttgattccgatatggtcaacgagtttaagctggagctggtggagaagcttttcgcggaagacacggaggcaaaaaaccccttctccacgcaggacacagatctagacctcgagatgctggccccctatatacctatggacgatgactttcagttgcgatcgtttgaccagttgtccccgctagagtctagcagcgccagcccggagtccgcctccccgcagtcgacagtgaccgtgtttcaacagacgcagatccaagaaccgaccgccaacgcgaccacgaccaccgccacaacagatgagttaaagacggttaccaaggatcgcatggaggatatcaagatcttgattgcctccccgtcgccaacacacatacataaggagactacgtcagcgacttcgtcgccttatcgtgatacccagtcgcgcacggcgtctccaaatcgggccggaaagggtgtaatagagcaaacagagaagagtcacccccgctcaccgaacgtgttaagtgttgccctgagccagcgcaccaccgtgccggaggaagaattgaaccccaagattttggccctacaaaatgctcaaaggaaacggaaaatggagcacgacggatctttgttccaggcggtgggcataggcactttattgcagcagccggacgaccatgcagccacgacctcgttgagttggaagcgcgtaaagggctgcaagtcatctgagcagaacggcatggaacaaaagacgatcatactgattccctccgacctggcttgccgtctgctcggacagtccatggatgaatcaggtctgccccagctgacctcatacgattgcgaggtgaacgcacctattcaaggttcccgcaatcttcttcagggtgaagagctgctccgagcactcgatcaagtgaat

SEQ ID NO: 33052 - DNA, 2478 bp, synthetic construct
  misc_feature 1..2478: note = Description of Artificial Sequence: Synthetic coding sequence
  source 1..2478: mol_type = other DNA
atggaaggtgcgggcggcgccaatgataagaagaagatttcgtcagaaagacgcaaggagaaaagccgggacgccgcgcggagccggcgcagcaaggaaagcgaagtgttttacgagctggcccaccaactcccactgccgcacaatgtaagctcccatcttgacaaggcgtctgtgatgagacttaccatttcatatctgcgagtccgcaagctcctggacgcgggcgacctggatatcgaagatgacatgaaggcccagatgaactgcttctacctgaaggccctggatggatttgtgatggtgctgaccgacgacggcgacatgatctacatcagcgacaacgtcaacaagtacatgggactgacccagtttgaacttaccggccactctgtgttcgacttcactcacccttgcgaccatgaggaaatgcgcgaaatgctgacccaccggaacgggctcgtgaaaaaaggaaaggaacagaacactcagcggtccttcttcttgcggatgaagtgcactctgacgtccagagggcggactatgaacattaagagcgcgacgtggaaggtgctgcactgcaccggacacattcatgtctacgataccaactcgaaccaaccgcagtgcggctacaagaagccgcctatgacttgcttggtgctgatttgtgaaccaatcccgcatccgtcaaacatcgagatccctctcgattctaagacctttctgagcagacacagcctggacatgaaattctcttactgcgacgaaagaattactgagctgatggggtacgagcccgaagagctgttgggaagaagtatctacgagtattaccatgccctggattcggaccatctgactaaaacccatcatgatatgttcaccaagggacaagtcaccactgggcagtaccgcatgctggccaagcgcggagggtacgtgtgggtggagactcaagccaccgtcatatacaacactaaaaactcacagccgcagtgtattgtctgcgtgaactacgtggtgtctgggatcatccagcacgacctcatcttctcgttgcaacaaaccgaatgcgtgctcaagccagtggaatcgtccgacatgaaaatgacccagctcttcacgaaagtggagtcggaagatacttcctccctgtttgacaagctgaaaaaggagccggacgccctgaccctgctggctcctgccgctggagatactatcatctcgcttgatttcggatccaacgacacggaaactgacgatcaacagctcgaggaagtgccgctgtacaacgatgtgatgcttcctagcccgaacgagaaactgcagaacatcaacctcgccatgtcgccattgccaaccgcggaaacgcccaagccgctgaggtcgtcagcagatccagcccttaaccaagaagtggcgttgaagctcgagcccaacccagaatcactggagttgtcgttcactatgccgcagatccaggatcagaccccgagcccatctgatggttccactcgccagtcgtcaccggagccaaatagcccctcggagtactgtttctacgtggactccgatatggtgaacgaattcaaactggagctcgtcgaaaaactgttcgctgaggacaccgaagctaagaatccattctcaactcaggatactgatctggatctcgaaatgctggccccatacattcccatggacgacgattttcagctgcggtcattcgaccagctttcaccgctggagtcctcttcagcgtccccggagtcggcctcgccacaaagtaccgtgactgttttccaacaaactcagattcaagaaccgaccgccaacgcgactactaccacggccactactgatgaacttaagacggtcactaaggaccggatggaagatatcaagattctgatcgcgtcgcctagcccgacgcacatacacaaggagacgacctccgccaccagctccccatatagagacacccagtccagaaccgcaagcccgaaccgtgcgggaaagggggtgatagagcaaaccgaaaagtcccacccacgctccccgaacgtcctgtcggtggctctgtcccagaggactaccgtcccggaggaggaactcaaccctaagatcctcgcactgcaaaatgcgcaacggaaacgcaaaatggaacacgacggctcgctgttccaggcggtgggcatcggaacccttttgcagcaacctgatgaccacgccgcgactacctcgctttcgtggaagcgcgtcaagggatgcaagagctccgaacagaatggtatggagcagaaaaccatcatcctgatcccatcagacttggcctgcaggcttcttggacagtcgatggacgaatccggattgccgcaactcacctcctacgactgtgaagtgaatgcccctattcaaggatcacggaatctgctgcagggagaagaactgctcagagcactggaccaggtcaac

SEQ ID NO: 33053 - DNA, 2478 bp, synthetic construct
  misc_feature 1..2478: note = Description of Artificial Sequence: Synthetic coding sequence
  source 1..2478: mol_type = other DNA
atggagggtgcgggaggagccaacgataagaaaaagatcagctcagagagacgaaaagagaagtcacgcgacgccgcacggtcgagacggtcgaaagaatccgaggtcttttacgagttggcacatcagctgccccttccccataatgtgtcgagccacctcgataaggcatcggtcatgcgccttactatttcatacctgcgtgtcagaaagctgctggacgcaggagatcttgacatagaggatgatatgaaggcacaaatgaattgtttctaccttaaggcccttgacgggtttgtcatggtgcttactgatgatggcgatatgatttacatctccgataacgtgaataagtacatgggactcactcaattcgaacttactggccattccgtgttcgattttacccatccatgcgatcacgaggaaatgagagaaatgctgacccatagaaacggtcttgttaagaagggcaaggagcaaaacactcagagatctttctttcttcgtatgaaatgcacccttacctcgaggggaagaactatgaacatcaagtcggccacctggaaggtgcttcactgtaccggtcatatccacgtctatgatactaactcaaaccagccccaatgtggatacaagaagcctcccatgacttgcctggtgcttatctgtgaaccaatccctcacccctctaacattgaaatccccctcgactcgaaaacctttttgtcgaggcactccctggatatgaaattcagctactgtgatgagaggatcactgagctgatggggtacgagcccgaagaacttcttggcagatctatctacgaatactaccatgcccttgactcggaccacctgactaagacccaccatgacatgtttactaaaggacaagtcaccacgggtcaataccgcatgctggcgaagagaggaggctatgtgtgggtggaaactcaggcaactgtgatttacaatactaaaaacagccagcctcagtgtatcgtgtgcgtgaactatgtggtgagtggaattatccagcatgatctgattttctccctccaacagaccgagtgcgtcctcaaacccgtggaaagcagcgacatgaagatgacccagttgtttacgaaagtggagtcggaagatacttccagcctgtttgacaagctgaaaaaggaaccggatgcactgacccttctggcacctgcggcgggagacactatcatttcgctggatttcgggtcaaacgacaccgaaactgatgatcaacaactggaggaagtgcctctgtacaacgatgtgatgctgccctcacctaacgaaaagctccagaacataaaccttgctatgtcgcccctgcctactgcagaaaccccaaagccactgagatcctccgcagacccagccctgaaccaggaagtcgcactgaagttggaaccaaaccctgaatccctggaactgtcctttactatgcctcagattcaagaccagacgccctctccttccgatggatcgactcggcaaagttccccagaacccaattcgccgtccgagtactgtttttacgtggattccgacatggtcaacgagtttaagctggagttggtcgaaaaactgtttgccgaagataccgaggccaagaaccctttttccacgcaagacaccgatcttgacctcgaaatgctggctccttacattccaatggatgatgattttcagcttagatcttttgaccagctcagcccactcgaatcgtcctccgcaagcccagaatccgcgtccccccagtcgaccgtgaccgtgttccaacaaacccagatccaagaacccactgcaaacgcaaccaccaccactgcaactacggacgagctcaagaccgtgaccaaggacagaatggaagatatcaagatattgatcgcaagcccttcgcctacccacattcataaggaaaccacctcagcaacttcgagcccctacagagacacgcaatcgcggactgcatcacctaacagagcaggaaagggagtgattgaacagactgaaaagtctcatcctcgaagcccgaacgtgctgtcagtcgcgctgagccaacgtaccacggtcccagaagaggagcttaatcccaagatactggcactgcaaaatgcgcaacgcaagaggaagatggagcacgatggttcactcttccaggcggtgggaataggtactcttcttcaacaacccgatgatcatgcggccaccacctctcttagctggaagcgcgtgaagggttgcaagtcgtcggaacaaaatggtatggagcaaaagacgataattctgatcccatccgatctggcctgccgcctgttggggcagtcgatggatgagtccggccttcctcaacttaccagctacgattgtgaagtgaacgcacctatccagggttccagaaacctgctgcaaggggaagagctcttgagagcactcgaccaagtgaac

SEQ ID NO: 33054 - DNA, 2478 bp, synthetic construct
  misc_feature 1..2478: note = Description of Artificial Sequence: Synthetic coding sequence
  source 1..2478: mol_type = other DNA
atggagggagcaggaggggcaaatgataaaaaaaagatttcttcagaacggagaaaggagaagtctcgcgatgccgctaggtccagaaggagtaaagaatcggaggtattttatgaacttgcccatcagctgcctctcccacataatgtgtcctcacacctcgataaagctagtgtaatgcggctgactatctcgtatctccgggtgcgaaaactgttagatgccggggatctggatatagaagatgatatgaaagcccagatgaactgcttctatttaaaagctctggacgggttcgttatggtgcttactgatgatggagatatgatatatatcagtgataacgttaacaaatatatgggacttactcagttcgaacttacaggacattcggtattcgattttacgcatccttgtgatcacgaggagatgagagaaatgttgacacatagaaacgggctagttaaaaaggggaaagaacagaacactcagcggtctttcttcttgcggatgaaatgcacacttacttcaagaggacgcacaatgaatatcaagagtgcaacatggaaagtcctccattgtactggacatattcacgtgtacgacactaattccaaccagccccagtgtgggtataagaaacctcctatgacttgcctggttctcatctgcgagccaattcctcacccttccaacattgaaataccactggactccaaaacattcctatcaaggcatagtctcgatatgaaattttcctattgtgatgaacggatcacagaattaatgggatacgaaccagaagaattgttggggagaagtatttatgaatattaccacgctttagattccgatcacctcacaaaaactcatcacgatatgtttactaaaggacaggttactactggacagtatagaatgcttgctaaacgagggggatatgtttgggtcgaaacacaggccactgttatctataacacaaaaaactcccagccccagtgtattgtgtgtgtgaattatgtagtcagtggaatcattcagcacgatctcatattctctctgcagcaaacagaatgtgtgctcaaaccagtggaaagtagtgatatgaaaatgacacagctcttcactaaagttgaatccgaggatacatcttctctgtttgacaaactcaaaaaggaacccgatgcacttacacttctcgcacccgcagctggagatacaatcataagtctagatttcggaagtaacgatacagagacagatgatcagcagctggaagaggtccccctttataatgatgttatgttgcctagtcccaacgaaaaattacagaacatcaatttagctatgtccccattgcccacagcagaaacacccaaaccactgcggtcctccgcagaccccgctcttaatcaggaagtcgcactcaaactggagccaaatcccgaaagtttagagctcagttttactatgccacagatacaggatcagacaccgtctccctctgatgggtcaactcggcagtcctctccagaacccaattctccgtcggagtactgcttttatgtcgatagtgacatggtgaacgagtttaaacttgaattggtggaaaaactgttcgccgaggatactgaagccaaaaatcccttttcaacacaggatactgacctggatctggaaatgctggccccctatatacctatggacgatgactttcagctccgctcatttgatcagctctctcctctggaatcctcatccgcttcccccgaatctgcctcccctcagtcaactgtgacagtgttccaacagacacagatccaggagccaacagcaaatgcaacgactacgacagcaacaactgatgagctcaagacagtgacaaaagatcggatggaagatatcaaaatacttatcgcctctccatcccccacacatattcataaagaaactacatctgcaactagttctccttatcgggatacacagtctcgaactgcgtcgccaaatagggccggaaaaggggtgatcgaacagacagaaaaatctcatcctagatcccccaacgttctttccgttgccctctctcagcgcactacagtgccagaagaagaactgaaccctaaaatccttgccttgcaaaacgcacagcggaagcgaaaaatggaacatgatggatcactcttccaggcagtcgggattgggacactcctccagcaaccagatgatcacgcggctactacatctctttcgtggaagcgcgtcaaaggatgtaaatcttcagaacagaatgggatggaacagaaaacaattatcctgatcccatctgatcttgcttgtcgcctgcttggacagtcaatggatgagagtggactgccccagctgacatcctatgattgtgaagtcaatgcccctatccagggatccaggaaccttctgcagggggaagaactactccgagctctcgatcaggtcaat

SEQ ID NO: 33055 - DNA, 2478 bp, synthetic construct
  misc_feature 1..2478: note = Description of Artificial Sequence: Synthetic coding sequence
  source 1..2478: mol_type = other DNA
atggaaggcgccggaggggccaatgataagaagaagatctcatcagagcggcggaaggagaagagccgggacgcggcgcgatccaggagatcgaaggaatcagaggttttctatgaacttgcccatcagctgccgttgccgcacaatgtgtcgtcacatctggacaaggcctcagtgatgcggttgacgataagctacctgagagtgcgtaagttgctggacgccggtgacttggacattgaggatgacatgaaggcacagatgaactgtttctacctgaaggcgctggatggattcgtgatggtgcttaccgacgatggagacatgatttacatctcagacaatgtcaacaagtacatgggactgacccagttcgagctgaccggccacagcgtctttgacttcacccatccatgcgaccatgaggagatgagagagatgctgactcacagaaacggactggtcaagaaggggaaggaacaaaacacgcagcggtcctttttcttgcgcatgaagtgcaccttgacctcgagaggacgaaccatgaacatcaagagcgcgacctggaaggtgctgcactgcaccggacacatccacgtctacgacaccaactccaaccagcctcaatgcggctacaagaagcctccaatgacctgcctggtgcttatctgcgaacccatcccacacccgtcaaatatcgagatccccctggactccaaaaccttcctcagcagacattccctggacatgaagtttagctactgcgacgagcgaatcaccgagctcatgggatacgagccagaagaactcctggggcggagcatctacgagtactatcatgccttggactcggatcatctcactaagactcaccacgatatgttcacgaaagggcaagtcactaccggccagtacagaatgctggctaaaagagggggatacgtgtgggtggagactcaggcgactgtcatatacaacactaaaaactcccaacctcaatgcattgtgtgtgtcaactacgtggtgagcggaatcatccagcacgatctgatctttagcctccagcagacggagtgcgtgcttaagccggtcgagtcgtcagatatgaaaatgacgcagctttttacgaaggtggaaagcgaagatacgagtagcctcttcgacaagctcaagaaagaaccagacgcactgaccctgctggctccagctgcaggagacaccatcatcagcttggatttcggctccaatgacacggaaaccgatgaccaacaactggaagaggtgccactgtacaacgacgtgatgctgccatcgccgaatgagaagttgcagaacatcaacctggcgatgtccccgctgccaactgcggagactcctaagccgctccgctcctccgccgacccagccctcaaccaggaggtcgctcttaagctggaaccgaacccagaatcactcgagctgagcttcactatgccacagatccaggatcagacgccttcgccttcagatggctccactcgccaatcctcgcctgaacctaattcgccatccgaatactgcttctacgtggattcggacatggttaacgagtttaaacttgagctggtcgagaaactgttcgcggaagatacggaggcaaagaacccattctccactcaagacaccgacctggacctggaaatgttggccccttacatccctatggacgatgattttcagctgcgctcattcgaccagctttcaccgctcgaatcctcgagcgcatcgccggagtcagcctccccgcagtcaaccgtgaccgtgttccaacagactcaaatccaagagcctactgccaatgcgactaccactacggctaccactgatgagctcaagactgtgactaaggatcgcatggaggacatcaagatcctgatcgcttccccatccccgactcacatccataaagaaactaccagcgctacctcgtccccctaccgcgatactcaatcacggactgcgtcgccgaaccgggccggaaaaggagtgatcgaacagactgaaaagtcccatccgcgctccccgaacgtgctgtcggtcgcattgtcccagcgcaccaccgtgcctgaagaagaacttaacccgaaaattcttgcgttgcaaaatgctcagcgcaaaaggaagatggagcacgacggctccctgttccaagccgtaggaatcggaacgctgctgcagcaaccggatgaccacgctgcgacgacctcactttcatggaagcgcgtgaaaggttgtaagtcctccgaacagaacggaatggagcaaaagactatcatcctgatcccgtcagacctggcctgccgccttttgggccagtcgatggacgagagcggcctcccacagctcacttcctacgattgtgaagttaatgctccgatccaaggttcccgcaatctcctccagggagaagaactgctgcgggcgcttgaccaggtgaat

SEQ ID NO: 33056 - DNA, 2478 bp, synthetic construct
  misc_feature 1..2478: note = Description of Artificial Sequence: Synthetic coding sequence
  source 1..2478: mol_type = other DNA
atggagggggcaggtggagcaaacgacaagaaaaagatttcttctgagcgaagaaaggaaaaaagccgagacgcggcgcgatctagacgcagtaaggagagcgaagtgttctatgagctggcgcatcaactgcccctcccccacaacgtctcttcccatctggacaaggccagcgtaatgcgcctgaccatttcctacctgcgtgtaaggaagttgctggacgccggagatcttgacatcgaggacgatatgaaggcacaaatgaattgcttctacttgaaagccctcgatggctttgtgatggtgctcacggacgacggggacatgatttacatttcagacaacgtgaacaaatacatgggacttacccagttcgaactgacaggccattctgtttttgattttacccacccctgtgatcatgaagagatgcgggaaatgctaacgcataggaacggacttgttaaaaagggcaaggagcagaacacccagagaagtttttttcttaggatgaagtgcactctcacaagtaggggcaggacaatgaacattaagtctgccacctggaaagtgttgcattgtacagggcacatccacgtgtacgacacaaacagcaatcagccccagtgcgggtacaaaaagccacctatgacgtgtttggttctgatttgcgagcccatcccccaccctagcaatatcgagatcccgcttgactccaagacattcctttctagacattctctggacatgaaattcagttattgcgacgaacggattaccgagctcatgggctatgaaccagaggagcttctcggtcgttccatatatgagtattaccatgctctcgactcagatcacctgacgaaaacacaccatgacatgtttaccaaggggcaggtgacaacaggtcagtaccgtatgctagcaaaaaggggaggctacgtgtgggtggaaacgcaggccactgtgatttataacacgaaaaattcccagccacagtgtattgtctgtgttaactacgtggtgtccggcattatccagcatgacctgatcttttcactacaacaaacagaatgcgtgcttaagcccgtagaaagttctgatatgaaaatgacccagttgtttacaaaagtggaaagtgaggacaccagcagtctgtttgacaagctcaagaaagaacccgatgcgctgaccctgctggctccagccgctggagatacaattatttctcttgacttcggctcgaacgacaccgaaactgatgaccaacaactagaggaagtcccactctataatgatgttatgctcccaagcccaaacgaaaagttgcagaacattaacctggcgatgtcccccctcccaacagccgaaaccccgaagccacttcgaagctctgctgaccccgcactgaaccaggaggttgccttgaagttggagccaaatcccgaaagtctcgagctcagctttactatgcctcagatccaagaccagacacctagtccgtcagatggttcaactcgacagtcttcccctgagccaaacagtccatcggagtactgtttctatgtggacagtgacatggtgaacgaatttaagctggagctggtggagaagttgttcgcagaagatactgaggctaaaaacccatttagcactcaggatacggatctagacctggagatgttggccccctatatccctatggacgatgactttcaactcaggtccttcgaccagctgagccccttagagtcctcaagcgctagcccagagtccgcttcccctcaatccactgtaaccgtgtttcagcagacacagatacaagagccaacagccaatgcaactaccacgaccgccaccactgatgagctaaaaacggtgactaaggatagaatggaagacataaagatcttgatcgcgtccccttctcccacgcatatccacaaagagaccacaagcgcaacctccagcccttatcgcgatacccagtctcggactgcaagtccgaatcgggctggaaaaggggtcatcgagcagaccgaaaagagtcatcctcgaagtccaaacgtcctatctgttgcgctgagccagcggaccaccgtgcctgaagaagaactcaacccaaagatcctagctctccaaaatgcacagaggaaacggaagatggagcatgatggcagcctttttcaagctgtgggcattggcactctcctgcagcagccagacgatcacgctgccaccacaagcttgtcctggaagagggtgaagggctgtaaatcgtccgagcagaacggcatggaacagaagaccatcatattaatcccttcagacctggcttgccgactgttgggtcagagtatggacgaatcgggtctaccccagcttaccagttacgactgcgaggtgaacgcacccatacaggggagccgcaatctcctgcagggagaggagttgcttagggctcttgaccaggtcaat

SEQ ID NO: 33057 - DNA, 2478 bp, synthetic construct
  misc_feature 1..2478: note = Description of Artificial Sequence: Synthetic coding sequence
  source 1..2478: mol_type = other DNA
atggagggcgcgggaggcgcgaacgataagaaaaagatcagctccgaacggcggaaagaaaagtcccgtgacgctgctagatcgcgcaggtccaaagagagcgaggtgttctacgagcttgctcaccaactgccgcttcctcacaacgtctcgagccaccttgataaggcctcagtcatgcgccttactatcagctacctccgggtccggaaactgctggacgctggcgacctcgacattgaggacgatatgaaggctcagatgaactgtttttacctgaaggccctggatggcttcgtcatggttcttaccgacgacggagacatgatctacatcagcgacaacgtcaataagtacatggggctcactcagttcgaactcaccggacactcggtgttcgactttactcatccttgcgatcacgaagagatgcgagaaatgctcacccaccggaacggtcttgtgaagaaaggcaaggagcagaacacccagcgcagcttttttctgcggatgaagtgcactctgacctcgcgcggacgcaccatgaacatcaaatcggctacctggaaagtgctccactgcactggacacatccacgtgtacgacactaactcgaatcagccacaatgcgggtacaagaagccaccgatgacttgcctggtgctgatctgcgaaccaatcccgcacccatcaaacatcgagatcccgctggatagcaagacgttcctgtcaaggcattccctggatatgaagttcagttattgcgacgaacgcatcactgaactgatgggatatgaacccgaggaactcttgggacgctccatctacgagtactaccatgcgctcgactccgatcacttgaccaagactcaccatgacatgttcaccaagggccaggtgactactgggcaataccggatgctggcgaagcgcggaggatatgtgtgggtcgaaacccaggctactgttatctacaacactaagaattcacagccacagtgcatcgtctgcgtgaactacgtggtgtccggaatcatccagcacgatctgattttctcgctgcaacagaccgaatgtgtgctcaaacctgtggaatccagcgatatgaagatgacccaactcttcaccaaagtggaatcggaggacacctcctcactgttcgataagctgaagaaggaacccgatgcgctgactctcctggccccagcggccggcgataccatcatctcgctggacttcggatccaacgacactgaaaccgatgaccaacagctggaagaggtcccgctctacaacgacgtgatgctgccatcgcctaatgagaaactccaaaacataaatctcgccatgagccccctgccaaccgcggagactcccaagccactgcgctcttcggccgatcctgccctcaaccaggaggtggccctcaaacttgagcccaatccagaatcgctggagctgtcatttaccatgccgcaaatccaggaccagacccctagcccgtcagacggcagcaccagacagtcatcacccgaaccaaactcgccatcagagtactgcttctatgtggatagcgatatggtgaacgagtttaaactggagctggtagaaaagctgttcgcggaagataccgaagcgaaaaaccccttctcaacccaggacactgacttggacctcgaaatgctcgccccgtacatcccgatggatgatgatttccagctgcgctcgttcgatcaattgtcacctctcgaatcgtcgtccgcgtccccggagagcgcgtccccgcagtcgaccgtgactgtgtttcaacagactcagattcaggaaccaactgcgaacgcaactactacgaccgcaacgaccgatgagttgaaaaccgttaccaaggacagaatggaagatatcaagatcctgatcgcaagcccctccccgactcatatccacaaggaaaccacctcagcaacctcgagcccttacagagatacccagtcccgcaccgcatcgccaaatcgcgcgggaaagggagtcatcgaacagaccgagaagtctcacccaaggtccccaaacgtgctgtcggtcgcactctcgcaaagaactactgtgcctgaggaggaactgaatcccaaaattctcgctctgcagaacgctcagcggaagaggaagatggagcatgacggatcactgtttcaagcggtcggcattggcaccctgctccagcaaccggacgatcacgctgcaacgacctcactctcatggaagcgcgtgaaaggttgtaaatcttccgaacagaacggcatggagcaaaaaacgatcattctcatcccgtccgacctggcctgtagactgcttggacagtccatggacgagagcgggttgcctcagctcacctcatacgactgtgaagtgaacgccccgattcaaggtagccggaacctgctgcagggggaagagctcctcagggcgctggatcaggtgaat

SEQ ID NO: 33058 - DNA, 2478 bp, synthetic construct
  misc_feature 1..2478: note = Description of Artificial Sequence: Synthetic coding sequence
  source 1..2478: mol_type = other DNA
atggaaggagccgggggagccaacgataagaagaaaatctcgagcgaacgccgtaaggagaagagccgggacgccgcccggtcgcggcgctccaaggagtctgaagttttctacgaactcgcgcatcagctgcccttgccacataacgtgtcatcccatctggacaaggcttccgtgatgcgtctgaccatctcgtacctgcgcgtccggaagctgctggacgcaggtgacctggacatcgaagatgatatgaaggcgcagatgaactgcttctacctgaaggcgctcgacggattcgtgatggtgttgacggacgacggcgacatgatttacatctctgacaacgtgaataagtatatgggactgacccaattcgaactcaccggacattcggtgttcgacttcacgcatccttgcgatcacgaagaaatgagggaaatgctcacccaccgcaacgggctggtcaaaaagggaaaggaacagaacactcagagatccttcttcctccgcatgaagtgcactcttactagccgcggacggaccatgaacattaagagcgcaacctggaaagtgctgcactgtaccgggcacatccacgtgtacgacactaatagcaaccaaccacaatgcggttacaagaaaccgcccatgacttgtttggtcctcatctgcgagccgattccgcacccttccaatatcgagatcccgctggattccaagaccttcctgagccgacactccctggatatgaaattctcctactgcgacgagcggatcactgaactcatgggctacgagcctgaagagttgctgggtcgctcgatctatgaatactaccatgccctggatagcgatcatctgactaaaacccaccatgacatgttcactaagggacaggttaccaccggacagtacaggatgcttgcgaagcgcggcggatacgtgtgggtggagactcaggcaaccgtgatctacaatactaagaattcacagcctcaatgcattgtgtgtgtgaactacgtggtgtccggaatcattcaacacgacctcatcttctcactccaacagaccgagtgcgtgctcaaaccagtggaatcaagcgatatgaagatgacccagctttttactaaagtggagtccgaggacactagcagcctgttcgacaaactgaaaaaggaacccgacgcacttactctcctggcccccgcggcgggagataccattatctccctggacttcggaagtaacgatactgaaactgatgaccagcagttggaggaagttccactgtacaacgacgtcatgttgccgtcgccgaacgaaaaactgcagaatatcaatcttgcgatgtcgccactgccgaccgccgaaactccgaagccgctgaggagctccgccgatccggcactgaaccaggaggtcgcgctgaagctcgaacctaatccggagagcttggagctttcgttcactatgccacaaatccaagatcagaccccgagtccgtcagatggatcgactcggcagtcctcacctgaacctaattcccctagcgagtattgtttctacgtcgattcggatatggtgaatgagttcaagttggaactggtcgagaaactgtttgccgaggatacggaagcaaagaatccattttccactcaagacacggacttggacctggagatgctggccccatacatacccatggacgacgattttcagctgcgctcgttcgatcaactctcccctctggaatcctcttcagcatcgcctgaatcagcttcaccgcagtcaaccgtcactgtgtttcaacaaactcaaattcaagaacccacggcgaatgcaactaccaccacggccaccaccgacgaacttaagactgtgaccaaggatcgcatggaagatatcaagattctgatcgcttccccctcgccgactcatatccacaaggagacgacttccgcgacttcatctccgtaccgggacacgcagtcacgcactgcctcgccgaaccgggccgggaagggagtgatcgagcaaactgagaagagccacccaagatcccctaacgtcctctcggtagctctgagccagcgcaccactgtgcccgaagaagagctgaacccaaagatcttggcccttcagaatgcacaaagaaaacggaagatggaacacgatggctccttgtttcaggcggtgggaatcgggaccctgcttcaacaacctgacgaccatgcagcaacgacttcgctttcgtggaaaagagtaaagggatgtaaaagcagcgagcagaacggaatggaacaaaagaccatcatcttgatcccatccgatctcgcgtgccggctgctgggacagtccatggacgagtctgggttgccgcagctcacttcctacgattgcgaagtgaacgcccccatccagggctcacgcaatctcctgcagggggaagagctgttgagagcgctggatcaggtgaac

SEQ ID NO: 33059 - DNA, 2478 bp, synthetic construct
  misc_feature 1..2478: note = Description of Artificial Sequence: Synthetic coding sequence
  source 1..2478: mol_type = other DNA
atggaaggagctggtggggccaacgataagaagaaaatttcgagcgaaagacggaaggaaaagtcaagagatgccgcgcggagccgccggtccaaggaatcggaagtgttttacgagctggcacatcagctgccactgccacataacgtatcgtcgcacctcgacaaagcgtccgtcatgaggctgaccatcagctatctcagggtgcgcaagctcctggacgccggagacttggatatcgaggatgacatgaaagcccagatgaactgcttctacctcaaagcgctggatggattcgtcatggtcctgaccgacgacggtgatatgatctacatctccgataatgtgaacaagtacatgggccttacccagttcgagctgacgggccactcagtgtttgatttcactcatccgtgcgatcacgaggagatgcgagagatgctcacccatcgcaatgggctcgtgaagaagggaaaggagcagaacacccagcgctctttctttctccggatgaaatgcacgctcaccagccggggacggactatgaatatcaagtccgcaacctggaaggtattgcactgcaccggccatatccatgtgtacgatactaactccaatcaaccgcagtgcggctacaagaagccgcctatgacctgcctggttctgatctgtgagccgatcccacacccatccaatatcgagataccgcttgactccaaaacctttctgagcagacacagcctggacatgaaatttagctactgtgacgaaaggatcacggagctcatgggctatgagcctgaggaactgctcgggcgctcgatctacgagtactaccatgcgctggattccgaccatctcacgaaaacccatcacgacatgttcaccaagggccaggtgaccaccggacagtaccgcatgctggcgaagcgagggggttacgtgtgggtcgaaacgcaggctaccgtcatctacaacacgaagaactcacaaccgcagtgtatcgtgtgtgtgaactacgtagtctcggggattatccagcacgatcttattttcagccttcagcagactgaatgcgtgctcaagccggtggaaagctcggacatgaagatgactcagctgtttacgaaggtcgagagcgaggacactagctcccttttcgataagctgaagaaggaacctgatgctctgactttgctcgcaccagccgctggtgatactataatctcgctggacttcggctccaatgacaccgaaactgacgaccagcagttggaagaggtccccctgtacaatgacgtgatgctgccgtcccctaacgaaaagctgcaaaatatcaaccttgccatgtccccgcttccgaccgccgagactccgaaaccgctgaggtcctccgcagatccagccctgaaccaggaggtggctctgaaactggaaccaaatcccgagtccctcgagctgagcttcaccatgccgcaaatccaggaccagactccaagcccgtcggacggcagtacgcgccagtcaagcccagaaccgaactcgccgtccgagtactgtttctacgttgattccgatatggtcaatgaatttaagctcgaactcgtggagaaattgttcgccgaagacactgaagcgaaaaacccgttctccactcaggatactgacttggatctcgaaatgctggccccgtacattccgatggacgacgacttccagttgaggtcgttcgaccagttgtcgcccttggaaagcagctcagcgtcaccagaatctgcctcgccgcagagcaccgtcaccgttttccaacagactcagattcaggaaccaaccgcaaacgccactactaccaccgctaccaccgatgagctgaaaactgtgactaaggaccgcatggaggacatcaagatcctgatcgcgtcaccgagccctacccacattcacaaggaaaccacctcggccacctcttcgccgtacagagacactcagtcgcggaccgcctcaccaaaccgggcggggaagggcgtgatcgagcaaactgagaagtcccatccgcgcagccccaatgtgctgagcgtggccctgtcgcagcggaccaccgtgcccgaagaggaattgaatcccaagatccttgcactgcaaaatgcccaacgaaagcgcaagatggaacacgacggatctctgttccaggcagttgggatcggaactctgctgcaacagccggacgatcacgcggcgactacgtcgctgtcgtggaagagagtcaagggctgcaaatcctcagagcagaacggtatggaacaaaagaccatcatccttatcccaagcgatcttgcctgccggctgctgggacaaagcatggatgaatccggattgccacaacttacttcctatgactgcgaggtgaacgctcctatccaaggttcgcgtaacctcctgcaaggagaggagctcctgcgcgccctcgaccaagtgaac

SEQ ID NO: 33060 - DNA, 2478 bp, synthetic construct
  misc_feature 1..2478: note = Description of Artificial Sequence: Synthetic coding sequence
  source 1..2478: mol_type = other DNA
atggagggagcgggaggagctaacgataagaagaagatttcctcagaaagaagaaaggagaagtccagggatgccgctaggagccgcaggagtaaagagtctgaggttttctatgaacttgctcatcagctgcctctgccacataacgtgtctagccacctcgataaggcttcagtgatgaggctgaccatatcctatctgagagtgaggaagttgctggatgctggtgacctggacattgaggatgatatgaaggcgcagatgaattgcttctacctgaaggctttggacggctttgttatggtgttgaccgacgacggagacatgatctacatttccgataatgtgaataaatatatgggactcacccaattcgagctgacaggacacagcgtgttcgactttacccatccatgtgatcacgaggagatgagagagatgcttacccaccgcaatggtctggtaaagaaaggtaaagagcaaaatactcagcgctcattttttctgagaatgaagtgtacgctgacatctaggggccgcactatgaatataaagagcgccacatggaaggtgctgcattgtaccggtcacatccacgtgtatgataccaactccaatcagccccagtgcggatataagaagccacctatgacctgccttgtgcttatatgcgagccaattccccacccatccaatattgaaatccctttggattccaagaccttcctgtcccgccattctctggacatgaaattttcttactgtgatgaacgcatcactgagctcatgggttacgaaccagaggagctcctcggcaggtccatctatgagtactatcacgcattggactctgaccacctgaccaaaacccaccacgacatgtttaccaagggtcaggtgactacgggtcaatataggatgctggctaagagaggaggttacgtttgggtagagacacaggctaccgtgatctacaacaccaagaactcccagccccagtgcatagtgtgtgtgaattacgtggtgtccggtatcatccaacacgaccttattttcagccttcaacagactgagtgcgtcctcaagccagttgagagttcagacatgaagatgacgcagctgttcactaaggttgagagcgaggatacttcaagcctgtttgacaaactgaaaaaggagcccgatgccctcacactgctggccccagccgccggcgacactatcatatctctggacttcggctctaacgacacagaaaccgacgatcagcagctggaggaggtcccattgtacaacgatgtgatgctgccatctccaaatgaaaagctgcagaacataaacctggctatgtcaccattgcccactgctgagacccctaagcctctgagatcaagcgctgacccggccttgaaccaggaggtcgccctcaagctcgaacctaaccccgaaagcctcgaactctccttcactatgccacagatccaggatcagactccctccccatctgatggttcaacacgccagtcaagcccggagccaaactctcccagcgagtattgcttctatgtcgactcagacatggtaaacgagttcaagctggaactggtggagaagctgtttgctgaagataccgaggcgaagaatcccttcagcacgcaggacaccgacttggatttggagatgttggccccgtacatccctatggacgacgattttcaattgcgcagtttcgatcagctcagtcccttggagtcctccagcgcctctcccgagagcgcctccccccagagtaccgtcacagtgttccaacaaacacagattcaagagcctaccgctaacgccaccactacgaccgcaacgaccgatgagctgaagaccgtcaccaaagacaggatggaggatatcaagatactgatcgcttctccttccccgacccacatccacaaagaaactacttcagcaacctcaagtccatatagggatactcagtctcgcaccgcttcccctaatcgcgcgggaaagggcgtgatcgaacagactgaaaaaagccaccctcgcagcccgaatgttctgtccgtcgcactgtcacagcgcacaacagttcctgaggaagaactgaatccaaagatcctcgctctccaaaacgcacagagaaagcgcaagatggagcacgacggcagtctcttccaagcagtgggcatcggaaccctgctccaacaaccagatgaccacgctgccaccacctccctgtcttggaagcgcgtgaagggctgcaaaagtagcgaacaaaatggcatggaacaaaagaccataatactcatcccctcagatctggcatgcaggctgcttggacagtctatggacgagtcaggcctcccacagctcactagttatgattgcgaggtgaacgcccctattcaaggttcaaggaaccttttgcagggagaagaactcctccgcgccttggatcaagtcaac

SEQ ID NO: 33061 - DNA, 2478 bp, synthetic construct
  misc_feature 1..2478: note = Description of Artificial Sequence: Synthetic coding sequence
  source 1..2478: mol_type = other DNA
atggagggcgccgggggagcaaacgataagaagaagatctcctcggagaggcggaaagaaaagtcccgcgacgccgctcggagccggcggtcgaaggagtcggaagtgttctacgagctggctcaccagctgcctctgccgcacaacgtgtcctcgcacctggacaaggcatcggtgatgaggttgaccatctcgtatttgcgcgtccggaagttgctggatgcgggcgacctggatatcgaagatgacatgaaggcccagatgaattgcttctacctcaaggcactggatggcttcgtcatggtgctcacggatgacggcgacatgatctacatctcggataacgtgaacaagtacatgggcctcacccagttcgagctgaccggccattccgtgtttgacttcacccatccgtgtgatcacgaagagatgcgggaaatgctgactcaccgcaatggactggtcaagaaggggaaggagcagaacacccagcgctccttcttcctgcggatgaagtgcactctgacttcaagaggcaggacgatgaatatcaagtcggccacctggaaggtcctgcactgcactggtcacatccacgtgtacgacaccaactcgaatcagccgcagtgcggatacaagaagcctccgatgacttgcctcgtgctgatctgcgaaccgattccacatccttcgaacatcgagatcccactggactccaagacttttctctcaagacatagcctggatatgaaattcagttactgcgacgagcggatcactgaactcatgggttacgaaccggaagaattgctgggccgttctatctacgaatactaccatgcgctcgactcggaccatctgactaagactcaccatgacatgttcactaagggacaagtgacgacgggacaataccgcatgctggcgaagcgagggggatacgtgtgggtggaaactcaagccaccgtgatctacaacaccaagaactcccagccgcaatgtatcgtgtgcgtgaactacgtggtgtccgggatcatccagcatgacttgattttctcactgcaacagacggagtgcgtgctgaaaccggtggaatcttccgatatgaaaatgactcagctcttcacgaaggtcgagtcggaggacacttcctcactgttcgacaaactgaagaaagagcctgacgcccttacgctcctggccccagcggctggagataccataatctcgctcgacttcggatcaaacgacaccgagactgacgatcagcagctggaggaggtgccgctctacaatgacgtcatgctgccgtcaccgaatgagaaacttcagaatatcaacctggctatgagcccgcttccgaccgccgaaaccccgaaaccgttgagatcctcagcggacccagcgctcaaccaggaggtggccctgaaattggagccgaacccagaaagcctggaattgagcttcaccatgcctcagattcaggatcaaaccccaagtccgtccgacggatcaacccgccagtcatccccagagccgaactccccgtcggagtactgcttctacgttgattccgacatggtgaacgaattcaaactggaactcgtggaaaaactcttcgctgaagataccgaggcaaagaatccgttcagcacccaggataccgacctggatctggagatgctggctccctacattcctatggacgacgatttccagttgcgctcgttcgaccagctctcgccactcgaatcatcgagcgcgtcgcctgaatccgcctcgccacaatccactgtcaccgtgttccagcaaacccagatccaggaaccgactgccaacgcgaccaccaccaccgccacgactgacgagcttaagaccgtcactaaggaccgcatggaggatatcaagatcctgatcgcctcgccgtcccctacccacatccacaaggaaactacttcggctacgtcgtccccttaccgggatacccagtccagaactgcctccccgaacagagcaggaaagggagttatcgagcagaccgaaaagagccacccgcggtcgccgaacgtgctctcagtggcgcttagtcagagaactaccgtgcccgaggaagaattgaacccaaagatcctggccctccagaatgcccagcggaaacggaagatggaacatgacggatcgcttttccaggccgtgggtattggtacgctcctgcaacagcccgacgatcacgcggcgactacctcgctgagctggaaaagagtgaagggttgcaagtcatccgaacagaatgggatggaacaaaagaccatcattttgattccatccgacctggcgtgcagactgctgggacagtcgatggatgaatcagggctgccccaactcacttcctacgactgcgaagtgaacgcgcctattcaaggatcgcgaaatctgctgcagggagaagaactcctgagagctctggatcaggtcaac

SEQ ID NO: 33062 - DNA, 2478 bp, synthetic construct
  misc_feature 1..2478: note = Description of Artificial Sequence: Synthetic coding sequence
  source 1..2478: mol_type = other DNA
atggaaggggcaggcggtgcgaacgataagaaaaaaatctcatcagagcggagaaaagagaaaagtagggacgcggctagatcacggaggagcaaagagtctgaagtcttttacgaactggcccaccagctgcctttaccacacaacgtcagttcacacctggacaaggccagcgtgatgagacttacaatcagctacctccgcgtcagaaaactgttagatgcaggcgatttggacattgaggacgacatgaaggcgcagatgaactgtttttatctcaaggcgctggatggatttgttatggttttgaccgacgatggagatatgatctacatctctgataatgtgaacaaatatatggggttaacccagttcgagcttactggacattctgtctttgatttcacccacccttgtgatcacgaagagatgcgagagatgctgacgcacagaaacgggctagtcaaaaaaggtaaagagcagaatacccagagatctttcttcctaaggatgaaatgcaccctgacctcacggggccggaccatgaacattaaatctgccacatggaaggtgttgcactgcacgggacatatccacgtgtatgacaccaattcaaatcagcctcaatgtggctataagaaaccgccgatgacctgcctggtgcttatctgtgagcccattccacacccttctaacattgagatccctctcgattctaaaaccttcctgagtagacattccctggacatgaaatttagctattgtgatgaacgcatcacagaactgatggggtacgaaccagaagaactcctggggcgcagcatctacgaatattatcacgcattggacagcgatcacctgacaaaaacccatcacgacatgttcacaaagggacaggtaacgaccggccagtacagaatgttggcaaagagagggggatatgtttgggtggaaactcaggccacggtgatatacaatactaaaaacagccaaccacaatgcatcgtgtgcgttaactatgtggtaagtgggataatccagcacgatttgatattctccctgcagcagactgagtgtgtgctgaaacctgtcgaatcatccgacatgaaaatgacccagttattcacgaaggtcgaaagtgaagatacctcgagtctgtttgataagctcaagaaagagcccgacgcgttgactctccttgctcccgccgcaggagatactatcataagccttgattttggctccaacgatacagagaccgatgaccaacagctggaggaagtccccctctataacgatgtgatgctgccgagccccaacgagaagctccagaatataaatctggccatgagccccctgcccaccgcagaaacacccaagccattaagatcatctgctgaccccgccctgaatcaggaggtggctttgaagctagagcctaaccctgagagcctggagctgagtttcaccatgcctcaaatccaggatcagacacccagtccctcagacggaagtactcggcagtcctcccccgaacctaattctccgtctgaatattgcttttatgtcgattcggatatggtaaacgagttcaaactggaactagtggaaaaactctttgccgaggacacagaggccaaaaatcctttctccacccaggatacagacttggacctagagatgctggccccctacatccctatggatgatgactttcagctgagatccttcgatcagctgtcgccacttgagagcagctccgcgagccccgagagtgcttccccccagtcaacagttacagtgttccaacagacacagatacaggagccaactgctaatgctactactactacggcaactacggatgaactcaaaacagtcacaaaggatagaatggaggacataaagattttgattgcatcaccgtctccaacgcacattcacaaagaaacaactagtgcaacctcttccccctaccgggatactcaaagcaggaccgccagtcccaaccgagctggcaagggcgtgattgagcagaccgaaaagtctcacccacggtcgccaaatgtgctttccgtggcgctgtcccagcgaactaccgtgccagaggaggaactcaaccccaaaatcctggcgctgcagaatgcacaacggaagcggaaaatggaacacgacggaagcctgttccaggcagttggcataggtactctcctgcagcagccagacgatcatgccgccaccacgtctctgtcatggaaaagagtgaaaggttgtaagagctcagagcagaacgggatggagcaaaaaacaataatcctgatcccatcagacttggcctgtaggctcttaggacagtcaatggatgaaagcggactgcctcagttaactagctacgactgtgaagtcaacgctccaattcagggatccagaaaccttctgcagggcgaagagctcctcagggccctggatcaggtaaat

SEQ ID NO: 33063 - DNA, 2478 bp, synthetic construct
  misc_feature 1..2478: note = Description of Artificial Sequence: Synthetic coding sequence
  source 1..2478: mol_type = other DNA
atggaaggagccggaggggcaaacgataagaagaagatctcttctgagagaaggaaggaaaaatctagagacgccgcaagatcaaggcgtagcaaagaatcggaagtattctacgagctcgcccaccaactccctctgcctcacaacgtgtcgtcacacctggataaggctagtgttatgaggttgacgatcagttatctacgtgtgcgaaagttacttgacgcaggagaccttgatatcgaagatgatatgaaagcccagatgaattgcttttacctaaaagccctggacggctttgttatggtgcttacagacgatggggacatgatttatatttccgacaatgtcaacaagtatatgggactgacacagtttgagctcaccggacactcagtctttgactttactcacccatgtgaccacgaggagatgagggaaatgttgacacacaggaacggtctggtgaagaaaggtaaggaacagaacacacaaaggagcttctttctgagaatgaagtgtacgttaacaagccgggggagaaccatgaacatcaaaagcgctacctggaaagtcttacactgtacgggccacatccatgtttatgacacgaatagcaatcagccacagtgtggttacaagaaaccacccatgacttgcctcgtccttatttgtgagcctataccacatccgtctaatattgagattccgctcgattccaagaccttcctgagccgacacagtctcgacatgaaattttcctactgtgatgagcgaatcaccgagctgatgggttatgaacctgaagagctgctcggacgatccatctatgagtattatcatgccctggattctgatcatttaactaaaactcatcacgacatgtttacgaaggggcaggtgaccacgggacagtatagaatgctggcaaaaagagggggctatgtgtgggtggagacgcaggcgactgtaatctacaatacaaagaatagccagccacagtgcatagtgtgcgtgaattatgttgtaagcggaataatccagcatgacctaattttctccctgcagcagactgaatgcgtgctcaagcccgttgagtcttccgacatgaagatgacacaattattcacaaaggtggagtccgaggacacttcgtctctgttcgacaagcttaagaaagaacccgacgctttgacactgctggcacctgctgccggggacaccataatcagcctagatttcggctcaaatgatactgaaaccgacgaccagcagcttgaggaggtgcccctttacaatgatgtgatgctgcccagccctaacgaaaagctgcagaacataaatctggcaatgagccccttacccaccgcagaaaccccaaagccccttcgctctagtgccgacccagccttgaatcaagaagtggctctcaaattggaacccaatcctgaaagtctcgaattgtcttttaccatgccgcagatacaggaccagaccccgagtccaagcgacggttcaacgcgccagtcttccccagagcctaactcccctagcgagtattgcttttatgtggacagcgacatggtcaacgagtttaagctggaactggtagagaagttatttgctgaggacactgaggccaagaacccattcagcacccaggatacggatctggatctggaaatgcttgcaccatatatcccaatggacgatgacttccagctgagaagttttgatcagctgtccccactcgagtcatcatctgcttcccctgagtctgcctctcctcaatctaccgtgaccgtttttcaacagacacagattcaggaaccgacagcgaacgccacaactacaactgccacaactgacgaactgaagacggtgactaaggaccggatggaggacatcaagattctgatcgcgtcaccctcccctacgcacatccataaagaaaccacaagcgccacctcctcgccttaccgagatacacagagccgtacagcttcaccaaacagggccggcaagggagtgatagaacagactgagaagtcacaccctcgcagcccaaacgtcttatctgttgcactgagccaacggaccactgtccccgaggaggagctaaaccccaaaatcttggcccttcagaacgcccagcgtaaacgaaaaatggaacatgacggtagcctcttccaggcagtggggatcggcactctgcttcagcagcccgatgaccatgccgccaccacttccctgtcttggaagcgggtaaaaggctgcaaatcttctgaacaaaatggcatggagcagaagacaatcatactcatccccagtgacctagcctgtcgtctgttaggccaatctatggacgagtcaggccttccccagctgacatcttatgactgcgaagtgaatgccccaattcagggctcaaggaatcttctgcagggcgaggagcttttacgagcgctagaccaggtgaac

SEQ ID NO: 33064 - DNA, 2478 bp, synthetic construct
  misc_feature 1..2478: note = Description of Artificial Sequence: Synthetic coding sequence
  source 1..2478: mol_type = other DNA
atggagggagcgggtggagccaatgacaaaaagaagatttcgtcagagaggagaaaggaaaagtcgcgggacgccgcccgcagcaggcggtcaaaggaatcggaagtgttctacgaactggcgcaccaactcccgctgccgcacaacgtctcatcccacttggacaaggcctctgtgatgcgactcactatatcctacctccgggtgagaaagctcctggacgcaggagatctcgacatcgaagatgatatgaaggcccagatgaattgcttctacctgaaagccctggacggattcgttatggtcctgaccgatgatggcgatatgatctacatctcagacaacgtgaataagtacatgggactcacgcagttcgagctgaccggacattcggttttcgacttcactcacccttgtgatcacgaagaaatgcgagaaatgctgactcatcgaaacggcctggtgaagaagggtaaggagcaaaatactcaacgcagcttcttcctgagaatgaagtgtactctgacctctcgcggacggaccatgaacatcaaaagcgcaacctggaaggtcctccactgcactggacatatccatgtgtacgacacgaattccaatcaaccccaatgtggctacaaaaagccaccaatgacgtgcctcgtcctgatctgcgaaccgatcccacatccatcgaatatcgagattccactcgattcgaaaaccttcctgagcagacattcgctcgatatgaagttcagctattgcgatgagcgcatcaccgaactgatgggatacgagccggaggagctgcttggccggagcatttacgaatactaccacgccctggattcggaccatctcaccaaaacccaccacgacatgtttaccaagggacaagtgactaccggacagtaccgcatgcttgctaaaagaggaggatacgtgtgggttgagactcaggcaaccgtcatctacaacactaaaaactcccaaccacaatgcatcgtgtgcgtgaactacgtcgtttccggcatcattcaacacgatctgatcttttcgcttcaacagactgaatgtgtgctgaaaccggtggagtcatcggacatgaaaatgacccaactcttcactaaggtggaatcggaagatacctcatccctcttcgacaagctgaagaaagaacctgatgccctgacccttctggccccggcggccggagacactatcatctcgctggactttggaagtaacgacactgagactgacgaccaacagctcgaagaagtgccgctgtacaacgacgtcatgctcccgtccccgaacgaaaaactgcagaatatcaatctcgcgatgtcaccactgcccaccgccgaaaccccaaagcccctccgctccagcgccgacccggcacttaaccaggaagtcgctctcaagctcgaaccgaacccggaatcgttggaactcagcttcaccatgcctcagattcaagaccagaccccatcaccgtcggacggttccacccggcagtcgtcaccagagccgaactcgccgtcagaatactgcttctacgtggactcggacatggtgaatgaattcaagctggaactggtcgagaagctcttcgcggaggacactgaggccaaaaacccgttctcgacgcaggacaccgatctcgacctcgaaatgttggctccatacatcccgatggacgatgacttccagcttaggtcattcgaccaactttcgcctcttgagtcgtccagcgccagccccgagtcagctagcccacagtcgaccgtgaccgtgtttcagcaaacccaaattcaagagccgactgctaatgccaccaccaccactgctactaccgacgaattgaaaactgtgactaaagatcggatggaggacattaagatcttgatcgcatccccgagcccgacccacatccacaaagaaaccacctccgccacttcctcgccgtaccgggacacccagagcagaaccgcctcaccgaaccgcgccggcaaaggcgtgatcgagcaaactgaaaagtcccacccacggtccccgaacgtgttgtcggtcgcgttgtcgcagcgcactaccgtgccggaagaagagctcaacccaaagattcttgcgcttcagaacgctcaacggaaaaggaaaatggagcacgacgggtccctgttccaagccgtcgggatcggaaccttgcttcaacagccggatgatcatgctgccaccacttccctgtcatggaagagagtcaaaggctgcaagtcctcggagcagaatggaatggagcagaaaaccatcatcctcattccatctgacctggcgtgccgcctgttgggacagagcatggatgagtcgggacttcctcaactgacttcatacgattgcgaggtgaacgcgccgatccagggctcgcggaacctgctccaaggcgaagaattgctgcgagccttggaccaggtcaac

SEQ ID NO: 33065 - DNA, 2478 bp, synthetic construct
  misc_feature 1..2478: note = Description of Artificial Sequence: Synthetic coding sequence
  source 1..2478: mol_type = other DNA
atggaaggagcgggtggtgcaaacgataagaagaagatttcttcggaaagaaggaaggagaaatcccgagatgcagcacggtcaagaagatcaaaggagtcagaggtgttttatgaacttgcacatcagttgccgctgccccataacgtctcttcccatctggataaggcatcggtgatgagacttactatttcctacctgagggtgcgaaagctgttggatgccggagatctggatatagaagatgatatgaaggcccagatgaactgcttttacctcaaggccctggacggcttcgtgatggtgcttacggacgacggtgatatgatctacatcagcgataatgtgaacaaatacatgggcctgactcagtttgaactgaccggacacagcgtgtttgatttcacccatccatgtgatcatgaagaaatgagagagatgcttactcaccgcaacgggcttgtgaaaaagggaaaggaacagaacacccagcgcagcttcttccttagaatgaagtgtacccttacttcccgaggaaggacgatgaacatcaaatcggctacctggaaggtgctgcattgtacgggccatatccacgtgtacgacaccaattccaatcaacctcaatgtggctacaagaagcctcccatgacttgcctcgtgctgatttgtgagcccattccacaccctagtaacatcgagattccacttgattctaaaacgtttctgtcgagacactcgcttgatatgaagttctcatactgtgacgagcgcatcaccgaactgatgggttacgaacctgaggaattgctcggacgtagcatatatgagtactaccatgcacttgattcagatcatctcaccaagacccatcacgatatgtttaccaagggtcaggtgacgacgggacagtaccgaatgcttgcgaagcgagggggctacgtctgggtcgaaacccaagcaaccgtcatctacaacaccaagaattctcagcctcagtgcatcgtctgtgtgaattacgtggtgagcggcatcattcagcatgatctcatattcagtctccaacaaaccgaatgtgtcctgaaaccagtggaaagctccgacatgaagatgacccaactttttaccaaggtggaatctgaggacacctcgtccctttttgacaaacttaagaaggaaccggacgcgcttactctgctcgccccagcagctggagacaccatcattagcctggattttggatccaacgatacggaaacggacgatcagcaactggaagaggtgccactgtacaacgatgtgatgcttccttcacccaacgagaaacttcagaacatcaatcttgcaatgtcgccactcccgaccgcagaaaccccaaagccacttcggtcctcagcagatcccgcattgaatcaagaagtcgcactcaaactggaacctaatccagaatcgttggagctgtcattcaccatgccacaaattcaagatcagactccttccccaagtgacggtagcacccgccaatcgtcgcctgagcctaactcgccgagcgaatactgcttttacgtggactccgacatggttaacgaattcaagctcgaacttgtggaaaagctctttgccgaggacaccgaggcgaaaaatccattctcaactcaagatactgacctcgatcttgaaatgttggcaccttacattcctatggatgatgactttcaactccggtcatttgatcagctgtcgcccttggagtcctccagcgcatcgcctgagagcgcgtcaccacagtcgacggttacggtgttccagcaaactcaaatccaagagcctaccgccaatgccaccactactactgccacgactgatgaactgaaaaccgtgacgaaagacagaatggaagatatcaaaattcttattgcttcccctagtccaacccacatccataaggaaaccacttccgcaacttcctcaccataccgtgatacgcagagccggactgcctctccaaacagggctgggaaaggcgtcattgagcagaccgaaaagagccatcctaggtcgcccaacgtcctctccgtggcactgtcccagagaactactgtcccagaagaggagcttaaccccaagatcctcgctcttcagaatgcacaacgcaaacgcaagatggagcacgacggaagcctgtttcaggccgtcggtattgggactctcctccaacaaccagatgatcacgccgcaaccactagcctttcctggaagagagtgaaggggtgcaagtcctcggaacaaaacggaatggaacaaaaaacgataattctgatccctagtgatttggcgtgccgactgttgggtcaatcgatggatgagagcggcctcccacagctgacttcgtacgattgtgaagtgaatgcacctatccaaggatccaggaacctccttcaaggagaagaattgctgcgggcgcttgaccaggtcaac

SEQ ID NO: 33066 - DNA, 2478 bp, synthetic construct
  misc_feature 1..2478: note = Description of Artificial Sequence: Synthetic coding sequence
  source 1..2478: mol_type = other DNA
atggagggtgcgggtggcgcaaacgacaagaaaaagatcagttcagaaaggcgcaaggaaaagtctcgcgacgccgccagatccagacgaagtaaggaatccgaggtgttctatgagttagcccaccagttgccactcccccacaacgtgtcgagccatcttgacaaggcgagtgtcatgcgccttactataagttacctgcgcgttaggaagctccttgatgctggagatctcgatatcgaggacgacatgaaggcccagatgaactgtttttaccttaaggcattggacgggttcgtgatggtgcttaccgacgacggggatatgatttacatcagcgacaacgtgaacaagtatatgggcctaacccagttcgagttaaccgggcattcggtgttcgactttacacacccctgcgaccacgaagaaatgcgagagatgctgactcacagaaacggcctggtcaagaagggtaaagaacaaaacacccaaaggtccttcttcttgcgaatgaagtgcactctgacctcgaggggtcgcaccatgaatataaaatccgccacatggaaagtcctccattgcactggccacattcatgtgtacgacaccaatagcaatcagccacagtgcggctacaagaaacctcccatgacatgcttggtattgatttgcgagcccatcccgcatccctcaaacattgagatacccttagacagtaagacattcctgtccaggcacagcctcgacatgaagttttcctactgtgacgaacggatcactgagctgatgggctacgaacccgaggagctccttggcaggagtatttacgaatattatcatgcactggacagcgaccatctgaccaagactcatcatgacatgttcacaaagggtcaggtcacaaccgggcagtatagaatgttggctaaaaggggggggtacgtgtgggttgagactcaagcgaccgtgatatataatacaaaaaactcccagccccaatgcatagtgtgcgtgaattatgtcgtctccgggatcatacagcatgatcttatcttcagcctccagcaaaccgagtgcgtcctgaagccagtggagtcatccgacatgaaaatgacccagctttttaccaaggtggagtctgaagatacgtcttcgctgttcgacaagttgaagaaagagcccgatgcactcacactccttgcccctgcagctggcgacaccatcatcagcctggatttcgggagtaatgatactgagaccgacgaccagcagctcgaggaggtacctttgtacaacgatgtcatgctgccttctcccaatgaaaaactgcagaacataaatctggccatgagccctcttcctacagctgagaccccgaaacccctcaggtcttctgcggatccagccctgaatcaggaggtggctctgaagcttgagcccaatcccgagagcctcgaactatccttcactatgccacagatccaggatcagacgccctccccatctgacggtagcacccgacaatctagccccgaaccaaattcgccttctgaatattgcttctatgtggattccgacatggtgaacgagttcaaactggagctggtcgagaaattattcgcggaggacaccgaggctaaaaacccattctccacccaggacactgacctcgacttggaaatgctggcgccgtatatcccgatggacgatgatttccagctgaggtccttcgatcagctgtcgcccttagagagctcctcggcgagccccgagtccgctagccctcaatcaacagttacagtattccagcagacccagatccaggagccaaccgctaatgctaccaccactactgccaccaccgatgagttgaagaccgtgactaaagaccggatggaagacattaaaatcctaatcgccagcccaagccccacgcatatccacaaggagactacaagcgccactagctcaccttaccgcgatacccagagccgcaccgcgtcccctaatcgggccggaaagggggtgattgaacaaaccgaaaagagtcatccgcgcagccctaacgtcctaagcgtggctctctcacagcgcacgaccgtcccagaggaggagctgaatcccaaaattttggcccttcagaatgcgcagagaaagcgcaagatggaacatgacggctctctgttccaggcggtgggcattggcacgcttctccagcagccagacgaccacgccgcgactacttctcttagctggaagagagtgaagggctgtaaatcgtcggaacaaaatgggatggagcaaaagacaatcatccttattcccagtgatttggcttgtcgtttgctaggacagagcatggacgaatccggcctgcctcagcttacatcgtacgactgcgaagtgaacgctccaatccaagggagccgaaacctcctgcaaggtgaggaacttctgcgcgcactcgaccaggtgaac

SEQ ID NO: 33067 - DNA, 2478 bp, synthetic construct
  misc_feature 1..2478: note = Description of Artificial Sequence: Synthetic coding sequence
  source 1..2478: mol_type = other DNA
atggagggtgctggaggagcaaacgacaaaaaaaagatcagtagcgaacgccggaaggaaaaatcacgcgacgcagcgcgctcgagacgatccaaagagtctgaggtgttttacgagctggcccatcagctccccctgccacataacgtctcgtcccacctggacaaagcgtctgtcatgaggcttactatctcttacctcagagtgcgaaaattgctggacgctggcgatctggacatcgaggacgatatgaaagcacagatgaactgcttttacctgaaagccctcgatggtttcgtcatggtgctgacagatgacggtgacatgatttatatcagtgacaatgtcaataaatacatgggcctgacacagttcgagctgaccgggcactcagtgttcgacttcacacatccgtgtgatcacgaggaaatgcgggaaatgcttacacatcggaatggactcgtcaagaaaggcaaagagcagaatacgcaacgcagcttcttcctgaggatgaagtgcacactcacaagccgcgggagaactatgaacatcaaatctgctacgtggaaagttctgcattgcaccggtcacattcacgtgtatgatacaaactccaatcaacctcagtgtgggtacaagaagccccccatgacctgtcttgtgctgatttgtgaaccgattccgcacccttctaacatcgaaatacccctggactcaaagacatttctctcacgacactctttggacatgaagttttcctattgcgatgagcgaataacagaactgatgggctacgagccagaggagctgctgggcaggtcaatctatgagtactatcatgcccttgacagcgatcacctcaccaagactcaccacgacatgttcactaagggccaggtgaccactggtcagtatcggatgctcgctaaacgagggggatatgtgtgggtcgagacacaggctacagtgatttacaatacaaagaactctcaacctcaatgcattgtatgcgtgaactatgtggtatcagggatcattcaacacgacctgatcttttctctgcaacaaaccgagtgcgttctcaagccagtggaatcaagcgatatgaagatgacccagctgttcacgaaagttgaaagtgaagatacttcttcgctgttcgataaactgaaaaaggagcctgacgctctgactctattggcacctgcagcaggagacaccattattagtctggatttcggcagcaacgacactgaaactgacgatcagcagctcgaagaggttccactctacaacgacgtaatgctgcccagccctaacgaaaagcttcagaatataaatcttgcaatgagcccacttcctactgcggaaacacctaagccccttcggtcgagcgccgaccctgcactcaaccaggaggtagcactgaagctcgagcctaaccctgaaagcctggagttgtcctttacaatgccacagatacaggatcagacacccagccctagtgatggctctactaggcagtcctcccctgaacccaacagtccctccgagtattgcttctacgtagactccgacatggttaacgagttcaagttggagctagtagaaaaattgttcgcagaggatactgaggccaaaaatccatttagcacccaggatacagacctagacctagagatgctggccccttacataccaatggacgacgattttcagttgagatcattcgatcagctgagccctctggagagctcctccgcctcgcccgaatctgctagcccccaatccactgttactgtatttcaacagacgcagattcaagagccaacagccaacgctacgaccactacagcaacgacagatgaactaaagaccgttactaaggaccggatggaggatatcaagatactgatcgcctctccatctccgactcatatccacaaagaaacaacttccgccaccagctctccttatagagacacacagtctcgaacagcatcccctaaccgggccggcaagggcgtaatagaacagactgagaagtcccaccccagaagtcccaacgtgctaagtgtggctctgagtcagaggaccaccgttcctgaagaggagttgaatccaaagattcttgcccttcagaacgcacaaaggaagcgaaagatggagcatgacggttctctgttccaggctgtgggaatagggaccctgctccaacaaccagacgaccatgccgcgactacttccctcagttggaaaagagtcaagggctgcaaatcgagtgagcagaacggcatggagcagaagacaatcatcctcattccttctgatcttgcctgccgactgctgggacagtcgatggacgagagtgggctgccacagctaacatcttatgactgtgaagtgaacgctcccatccagggatccagaaacctcctgcagggcgaggagctccttcgggctctggatcaggtgaac

SEQ ID NO: 33068 - DNA, 2478 bp, synthetic construct
  misc_feature 1..2478: note = Description of Artificial Sequence: Synthetic coding sequence
  source 1..2478: mol_type = other DNA
atggagggggctggaggcgctaacgacaagaaaaaaataagctcagagcgtaggaaagagaaaagcagagatgctgcgagaagccggagaagcaaggagtccgaggtgttctacgagctggcacatcaactgcctctgccgcataacgtgagctcccatctggataaggcatctgtgatgagactaacaatctcatatctcagggtgcggaagctccttgacgccggagatcttgatattgaggatgatatgaaagctcagatgaactgtttctacctaaaagctctcgatggatttgtcatggtgctgacagatgatggagacatgatttatatcagcgataacgtgaacaaatacatgggtctgactcaattcgagctgaccggccatagcgtgttcgacttcacacatccctgcgatcacgaagaaatgagggagatgcttacccaccgcaacggattggtgaaaaaaggcaaagagcagaacacccagaggagcttcttccttcgaatgaaatgtacactgaccagcaggggccggactatgaacattaagtctgctacgtggaaagtgctgcattgcacagggcacattcacgtgtatgacacaaactcaaaccagcctcaatgtggatacaagaagcctcctatgacatgccttgtcctgatctgcgagcccatacctcacccatctaatattgaaatccctctggacagcaaaaccttcttgtcgcgccattccttagacatgaaattttcatactgtgatgaacggatcacagagctgatggggtatgagccagaggagttgctggggcgcagcatttacgaatactaccacgctctggacagcgatcacctgactaagacacaccacgatatgttcaccaagggccaggttaccactggtcaataccgcatgctggctaaacgtggtggctacgtgtgggtcgaaacacaggccactgtgatttacaacaccaagaacagtcaaccacaatgcattgtctgtgtaaactatgtggtcagcgggatcatacaacacgatctgatcttttcacttcagcagaccgaatgcgtactgaaacccgtcgagtccagtgacatgaagatgactcagctattcacaaaggtggaaagtgaagacaccagctctctgttcgataaacttaagaaggaaccagacgctctgacactcctggcacctgcagctggagacacaattatcagtcttgacttcggatctaacgacactgagacagatgatcaacagctggaggaggtcccactctacaacgatgtcatgctgcccagccctaacgaaaaattgcagaacattaacctggccatgtctccactgccaaccgccgaaacccccaaacccctcagaagcagcgcagatcccgccttaaaccaagaagtggctcttaaacttgaaccaaacccagagagcctggagctgtcttttacaatgcctcagattcaggatcagacccctagccccagcgatggaagtacccgccaatcctcccccgagccaaacagcccctcggagtactgtttctacgtcgactccgatatggtaaatgaatttaagctggagctggtggagaagttgtttgcagaagacacagaagccaaaaacccattttcaacccaagacactgacctcgatctggaaatgctcgctccctacatcccaatggacgatgatttccaactgaggagtttcgatcagcttagcccactggagtcttcctctgctagcccagaaagtgcatccccgcagagcaccgtgacggtttttcagcaaacccaaatccaagagccaaccgcaaatgctacaactaccacagcaaccacagacgagctcaaaaccgtgactaaggacagaatggaagatatcaagatactgatcgctagcccatctcccactcatatccataaggagaccacatctgcgactagtagtccatacagggatacacaatcacgcaccgcaagtccaaaccgggctgggaaaggcgtgatcgaacaaactgagaagagtcacccaagaagcccaaatgtgttgtcagttgccctgagccaaaggactaccgtcccggaggaggaactgaatcccaagatactcgccctgcagaacgcacaaagaaagaggaaaatggaacacgacggctctctttttcaagcagtcgggatcggaactctgcttcagcagcctgacgaccatgcagctacaacttccctgtcatggaagagagtcaagggatgcaagtctagtgaacagaacgggatggagcaaaaaacaatcatcctgatccctagtgatcttgcttgcaggctgttgggacagtccatggacgagtcaggactgcctcagctcacttcctacgactgcgaagtcaacgctcccatacagggttctcgcaacctgctccagggggaagaactccttagggcacttgaccaggtgaac

SEQ ID NO: 33069 - DNA, 2478 bp, synthetic construct
  misc_feature 1..2478: note = Description of Artificial Sequence: Synthetic coding sequence
  source 1..2478: mol_type = other DNA
atggaaggtgcggggggtgccaacgacaagaagaagatcagttcagagcgccggaaagagaagtcacgcgacgcagcgaggagccgaagatccaaagagtcggaggttttctacgaactcgcacaccagttgccattgccacacaacgtctcctcacatctcgataaggcttcagtgatgcgactgacgatctcatacttgagggtccggaagctcctggacgccggagatcttgatattgaggacgacatgaaagcgcagatgaattgcttttacctgaaagcattggacggattcgtgatggtgttgactgacgatggcgacatgatctacatctctgacaatgttaacaagtacatgggcctgacccagttcgagcttactggacactcggttttcgacttcactcatccgtgtgaccacgaagagatgcgcgaaatgctgacccatagaaacggactggtgaagaaaggcaaggaacaaaacactcagcgctcgtttttcctccggatgaaatgtaccctgacttcaagaggtcggaccatgaatatcaaatcagccacgtggaaggtccttcactgcacgggacacatccatgtctacgacactaactctaatcaaccacagtgcggctacaagaagcccccaatgacttgccttgtgctgatctgtgaaccaatcccgcacccgtcaaacatcgagattccacttgactcaaagacttttctctctcgtcattcactggacatgaagtttagctattgcgacgaaagaatcacggaactcatgggatacgaaccggaagaactcctgggccgctcgatctacgagtattaccacgccctcgattcggatcacctgaccaagacccatcatgacatgttcaccaaaggacaagtgaccactggacagtaccgtatgctcgcgaagcggggaggatacgtgtgggtcgaaactcaggccactgtcatatacaacacgaagaactcacaaccgcaatgcatcgtctgcgtgaactacgtggtgagcgggatcatccagcatgacctgatcttttcactccagcaaaccgaatgcgtgctgaagcctgtggaaagcagcgacatgaaaatgacgcaactcttcaccaaggtggagtcggaagatacctcatcattgttcgacaaactcaagaaggaaccggatgcattgactctgctggcgccggccgcaggggacactattatctcgttggatttcgggtccaacgacaccgagactgatgatcaacagctggaggaggtgccgctgtacaacgacgtgatgttgccctcaccgaatgaaaagctgcaaaacatcaatttggcaatgtcaccgctccctactgcggaaaccccgaagcccctgagatctagcgccgacccagccctgaatcaagaagtggctctcaaacttgaaccaaatccggagagtctcgagctcagctttaccatgccgcaaatccaggaccagactccgtctccttcagatggaagtactcgccaatcaagccccgagcctaactcgccgtctgaatactgcttttacgtcgactccgatatggtgaacgaattcaagctcgaacttgtcgaaaaacttttcgcggaggataccgaagccaaaaaccctttctcgacgcaagacactgatctggatctggagatgctggcgccctacatcccaatggatgacgatttccagctgagatcgttcgatcagctgtcacctctggaatcgtcctcggcttctccggaatccgcctccccccagagcaccgttaccgtgttccagcagacccagatccaggagccgaccgccaatgccaccactaccaccgccactactgacgaacttaagaccgtgaccaaagatcgcatggaagatatcaagattctgatcgcaagtcccagcccgacccacattcataaggaaactaccagcgcaacctcctcgccttatagggacactcaatcgaggaccgcctcgccaaaccgggctggaaagggcgtcatagagcagacggagaaatcgcacccacgatcgccgaacgtgctttcggtggcactgagccagcggactacggtacctgaagaggagctcaacccgaagattctggccctgcaaaatgctcagcgcaaacggaagatggagcacgacggctccctttttcaggccgtggggatcggtacgttgttgcagcagccagatgaccacgccgctaccactagcctgtcctggaagcgcgtcaaggggtgcaagtcgtcggaacaaaatggaatggaacaaaagaccatcatcttgatcccgtccgatctcgcgtgtcggctgctgggccagagtatggacgagtcaggactgcctcagcttactagctacgactgtgaggtcaacgcaccaattcagggatcacgcaacctgctgcaaggagaggagctccttcgggctctggaccaggtgaat

SEQ ID NO: 33070 - DNA, 2478 bp, synthetic construct
  misc_feature 1..2478: note = Description of Artificial Sequence: Synthetic coding sequence
  source 1..2478: mol_type = other DNA
atggaaggcgcgggaggagccaacgacaagaagaagatctcctcggaaagacggaaggagaagtcaagagacgcagccaggtcacgacgatcgaaggagtcagaagtgttctacgagcttgcccaccagctccccctcccgcacaatgtgtcctcccatcttgataaagcgagcgtgatgcggctgactatctcatacctgcgagtccgcaaactgctcgacgccggggatttggacatcgaagatgatatgaaggcccagatgaattgcttctacctgaaggccttggacggttttgtgatggtcttgaccgacgacggggacatgatctacattagcgacaacgtgaacaagtacatggggctgacccagtttgaattgaccggacacagcgtgttcgacttcacgcacccttgtgaccacgaggaaatgagagagatgctgacgcatcgtaacggcctcgtgaagaaggggaaggagcaaaatactcagagatccttcttcctccgcatgaagtgcaccctgacttcacggggtcgaaccatgaatatcaaatcggccacttggaaggtcctccactgcactggacacatccacgtgtacgacaccaacagcaaccaaccgcagtgcggatacaagaagccgccgatgacgtgtctcgtgctgatctgcgaacctattccacacccctcgaacattgagatccctctcgattctaaaaccttcctgtcgaggcactcgcttgatatgaaattctcctactgtgatgaacgaatcactgagcttatgggatacgagcccgaggaactcttgggcaggagcatctacgaatactaccacgctctggattcagatcacctgaccaagacccatcacgatatgttcaccaagggtcaggtcacgactgggcagtatagaatgctggctaagcggggcggctacgtctgggtggaaactcaggcgactgtgatctacaataccaaaaacagtcagccgcagtgtatcgtgtgcgtgaactatgtggtgagcggaatcatccagcacgatctgatcttctcactgcaacaaaccgaatgcgtccttaagccggtggaatcgtccgacatgaaaatgactcaactgttcacgaaggtggaatcggaggacactagctcccttttcgacaagctcaagaaggagccggacgccctgaccctgctcgccccagcggcaggggacactatcatttccctggacttcggttcgaatgatactgaaaccgatgaccagcagctggaagaagtcccgctctataacgacgtgatgctcccttcgccaaacgagaaactccagaacattaatctggccatgtctccactgcctaccgcagagactccaaagccgctgaggtcgagcgcagatcctgccctgaatcaagaggtcgctctgaagctggaaccgaacccggagtcgctggagctctcattcactatgccacagatccaggaccagactccgtccccttccgacggttcgactcgccagtcgtccccggaaccaaattcaccgagcgagtattgcttttacgtggactcagatatggtcaacgagtttaaactggaactggtcgagaagctcttcgcagaggacaccgaagcgaagaacccgttcagcactcaggacactgacctggacctggaaatgctcgctccctacattcctatggatgacgacttccagttgagatcattcgatcagctgtcccctttggaatcttcatcggccagccccgaatcagcttcgcctcaaagcactgttaccgtgttccagcagactcaaatccaggagccaaccgcaaatgccacgaccaccactgcgacgactgacgagctcaagactgtgactaaagaccggatggaggacatcaagatcctgatcgcatcaccctccccgacccacatccacaaggaaaccacttcagccacttcatccccataccgcgacacccagagccggaccgcttcgcccaatcgcgctggtaagggcgtcatcgagcaaaccgagaaaagccatccacggagcccaaacgtactgtcagtggccctgtcccaacgcacgactgtgccggaggaggaactcaacccgaagatcctggcccttcaaaatgcccagcggaaaagaaaaatggagcatgatggatcccttttccaggccgtgggcatcggaaccctcctgcagcagccggacgatcacgctgcaactacttctctgtcctggaagcgggtgaaaggttgtaagtcgagcgagcagaatgggatggagcaaaagacgatcattctcattccgtcggatctggcctgtcggctgctcggtcaatcgatggacgaatcgggactgccgcaactgacctcctatgattgcgaagtcaacgcccctatccagggaagcaggaacctgctccaaggagaggagctcctgagagccctcgaccaggtgaat

SEQ ID NO: 33071 - DNA, 2478 bp, synthetic construct
  misc_feature 1..2478: note = Description of Artificial Sequence: Synthetic coding sequence
  source 1..2478: mol_type = other DNA
atggagggcgctggaggggccaacgacaagaagaaaatcagcagtgaaagaagaaaggaaaagagtcgagacgctgcccgctcacggagatctaaggaaagcgaagtcttctacgaactcgcccatcaacttccgctgccacacaacgtaagctctcatctggataaggccagtgtgatgcgactcacaatctcatacctgagagtgcggaagttgctggatgccggcgacctggacattgaggatgatatgaaggcacagatgaactgtttctatttgaaggcgctcgacgggtttgtaatggtcctgactgatgatggcgacatgatttacatttcagacaatgtgaacaaatatatggggctgactcaatttgagcttaccggacattccgtatttgacttcacacatccatgcgatcacgaagaaatgagagagatgcttacccataggaatgggcttgtaaagaaaggtaaggagcaaaacacgcagagatcattctttctgcgaatgaagtgcaccctgacgtcccgcggtcgcaccatgaatattaaaagcgcaacttggaaggtgctgcattgcacggggcacattcacgtctatgatactaactccaaccagccacagtgtggatacaagaagcccccaatgacctgcttggtcctgatctgtgagcctataccccacccgagcaacatcgaaatacccctggactccaagacctttctgagcaggcactcacttgatatgaagttttcctactgtgatgaaagaattaccgaactcatgggatatgagcccgaggagttgctcgggcggagcatttacgagtactatcatgcgttggacagcgatcatctgaccaaaactcatcatgatatgttcaccaaagggcaagtgacgaccggtcagtatcggatgctggccaaacggggcggatatgtatgggttgagacccaggccacagtgatctacaacacaaaaaattcccagccacagtgcatcgtatgcgttaattacgtggtgagtggcataatccaacacgacctgattttctctcttcagcagaccgaatgcgtgctgaagcccgtcgaaagttctgatatgaaaatgacacagctgtttactaaggtggaatccgaggatacatcaagtttgtttgacaagctgaagaaagaacccgacgcactgaccctcctcgctccagccgctggcgacacaataattagtttggatttcggcagcaacgatactgaaaccgacgaccagcagctggaggaggtgcccctctataacgatgtgatgctgcccagtcccaacgaaaaacttcagaatatcaatttggcaatgtcacctctcccaaccgccgagacacccaagccactgcgatcatctgctgaccctgcgctgaatcaagaggtggccctgaaactggaaccaaacccagaaagcctggaattgtcctttaccatgccccagatccaggatcagaccccctctccttctgacggttccacccgacagtctagcccggagccgaacagcccaagcgaatactgtttctatgtggattctgatatggtaaatgagtttaagctggagctcgtcgaaaaactgttcgccgaggacaccgaggccaagaacccgttctctacgcaggatacagatctggacctcgagatgttggcaccctatatccctatggacgatgatttccaactgcggagcttcgatcagctgtcccccctcgaaagctcctctgcgtctcccgagtcagcatctccacagagcaccgttaccgtatttcagcaaacccaaatacaagagcccactgctaatgctacaactacgaccgccaccactgatgagctgaaaaccgtaaccaaggacaggatggaggatatcaagattctcatcgcctctccctcacctacacacatccataaggagactacatctgctacctcttctccttacagggatactcagtctaggacagctagtccgaacagggccggcaagggcgtgatcgagcaaacagagaaaagtcaccctagatctcccaatgtgctgagcgtggccctgtcccagcggaccaccgtcccagaggaggaattgaatcctaaaatactggccctgcagaatgcccagcgaaaaaggaaaatggaacacgacggttctctgttccaagccgtggggatcggcactttgctccagcagcctgatgaccacgctgcaacaactagcctgagttggaagagggtcaaagggtgcaaatcatctgaacagaatggaatggagcaaaagacaataatccttataccaagtgatttggcctgcaggttgctggggcagtctatggacgagtccggcctgccccaactgacgtcttatgattgtgaggtcaatgccccaatccagggctcacggaatctcctccagggggaggaactgctcagagctctggaccaggtaaac

SEQ ID NO: 33072 - DNA, 2478 bp, synthetic construct
  misc_feature 1..2478: note = Description of Artificial Sequence: Synthetic coding sequence
  source 1..2478: mol_type = other DNA
atggagggcgctgggggggctaacgacaagaagaagataagcagcgagcggaggaaagaaaaaagcagagacgctgcacggtcccgtcgaagtaaggagtcagaggtcttttatgagctcgcccatcagctgccactcccccacaacgtctcgtctcacctagataaagcctctgtcatgaggctgaccatctcatacttacgagtgaggaaactattagacgccggggacctggatatcgaggatgatatgaaagctcagatgaattgtttttacctcaaagcgttggatggcttcgtcatggtactgacagatgacggcgatatgatctatatctcagacaatgttaacaagtatatgggtctgacccagttcgagcttacgggacatagcgtctttgattttacacatccttgtgatcacgaagagatgcgtgaaatgctgacccaccgcaacggtctagtgaaaaagggaaaagagcagaatacacaacggtctttttttctgcgcatgaagtgcactctgacctccaggggacgcaccatgaatatcaaatctgccacatggaaggtgctacactgtaccggccatatccacgtgtacgacacaaactcaaaccagccacaatgcgggtataaaaagcctcccatgacatgccttgttctgatctgtgagccgataccacacccgagtaacatcgagatccctctcgactccaaaacgtttctcagcaggcactcgctcgacatgaaattttcctattgtgacgagaggattacagagcttatgggctacgagccagaggaattgctcggccgcagcatctacgaatactatcacgcactcgatagcgaccacctcactaagacccaccacgacatgtttacaaaggggcaagtgaccaccggccaatatcgcatgctcgccaagaggggagggtacgtctgggttgagacgcaggccaccgtgatatacaataccaagaactctcagccacaatgcatcgtatgtgttaattatgtggtcagtggaattattcagcacgacttaatcttttctctgcagcaaaccgaatgcgttttgaaacctgtggagagttctgacatgaagatgacacaactcttcactaaggtggaatctgaggatacctccagtcttttcgacaaactgaagaaggagccagatgctttaactctgctggcccccgccgccggcgataccattatctccctagacttcggtagcaatgatacagagaccgacgatcagcagctggaggaagtgcccctgtataacgatgttatgctcccctcgccaaacgaaaagctgcagaacattaatctagcaatgtcaccattgcctacggcagagacccctaagcctctgcgaagctccgccgatcccgccctgaatcaagaagtggctctgaaactggaaccgaaccccgagtccctcgagctgtcttttaccatgccacagattcaggatcagacaccttcccctagcgatggtagcacaaggcaatccagccctgaacctaactcacccagcgaatactgtttttatgtggactccgatatggtgaatgagttcaaactcgaactggtcgagaagcttttcgccgaagatactgaggcaaagaatcccttttctacacaggatacagatctcgacttggaaatgctggctccctatatacctatggacgacgacttccagttgagaagctttgaccagctatcgccactcgaatctagtagcgcgtctcctgagtcggcgtcccctcaatcgaccgttaccgtgttccagcagacccaaatccaagaaccaaccgcgaatgccactaccacaaccgctaccactgacgaactgaaaaccgtaactaaggaccggatggaagacataaaaatcctgattgcctccccctccccgacacatatccataaagaaacgacctcagccacttcatcaccataccgcgatactcaatcgcgaaccgcctcacctaatcgagccggaaaaggagtgatcgaacaaaccgagaagtcccatccaaggtcccctaacgtgttgagcgtcgcactgagccagagaacaaccgtgcccgaagaggaactgaaccctaaaattctggccctccagaatgcccagcgaaagcggaagatggagcacgatggcagccttttccaagcagtggggatagggactcttctgcaacagcctgatgatcacgcggctacaacatccctttcgtggaaacgggttaaggggtgcaagtcttctgagcaaaatggcatggaacagaagactatcattctgattcccagtgatctggcatgcaggctcctaggccagtcgatggatgagtcagggctacctcagctgaccagttatgactgtgaggtcaacgcccccatacagggctccaggaatctcctccaaggcgaggaactcttgagggccctggaccaagtaaat

SEQ ID NO: 33073 - DNA, 2478 bp, synthetic construct
  misc_feature 1..2478: note = Description of Artificial Sequence: Synthetic coding sequence
  source 1..2478: mol_type = other DNA
atggagggggctggaggagcaaacgataagaagaagataagcagtgagcggcggaaggagaagagtagggacgccgcacgtagtaggagatccaaggaaagtgaagtgttttacgaactcgcccaccagctgcctctgccacacaacgtgtccagccaccttgacaaagcctctgtaatgagattgaccatcagttatctcagagttcggaaactgttggacgccggagaccttgatattgaagatgacatgaaggcacagatgaactgtttttatctgaaagccctagatggatttgtcatggtgctgactgatgatggcgatatgatttacatctccgataatgtgaacaagtacatggggcttacacagttcgagcttacaggacatagtgtgttcgactttactcatccctgcgatcacgaagaaatgagagaaatgctaactcatcgaaatgggttggtcaagaaaggtaaggagcagaacacccaacgctcttttttccttcgaatgaagtgtacccttacgtcacgggggaggactatgaacatcaagagtgccacgtggaaggtgctccactgcacgggtcacatacacgtgtacgacaccaactccaaccaacctcagtgcgggtataagaaaccgcccatgacttgtctcgtactcatatgtgagcccattccacacccctctaatattgagattccccttgacagcaagacttttctgagccggcactcactagacatgaaattttcatactgcgacgaacggatcactgaactgatggggtacgaacccgaagagctcctcggccggtcaatctacgaatattaccacgccctagatagtgaccatctcactaagacacaccacgatatgtttactaaagggcaggtcacgacagggcagtataggatgctggccaagcgtggcggttacgtctgggtagagacacaggctactgtcatttataacacaaaaaattcccagcctcaatgtatcgtctgcgttaattatgtggtgagcggaattatccagcacgacttgatttttagcctccagcagacagagtgcgtgctaaaaccagttgaaagttctgacatgaaaatgacacaactgtttactaaggtcgaatccgaagataccagtagcctgttcgataagctgaagaaagaacccgacgccctgaccctcctggctcctgccgcgggcgatacaattatttcactggactttgggagtaatgacactgaaacagacgaccagcagctcgaagaggtgccactgtataacgatgtaatgttgccctcccctaatgaaaaacttcaaaacatcaacctggcgatgagcccgctgccaaccgctgaaactcccaagcctctgagatcgtctgccgatccagcccttaatcaggaggtcgcattaaaactggaaccaaaccctgagagcctggaactaagctttacgatgcctcaaatccaagaccagacaccatcaccatctgatggatccacacgccagtctagtccagagcccaactcacctagcgaatattgtttttacgtagacagcgatatggtgaacgaatttaagctggagttagtggagaaactgtttgccgaagacactgaggccaagaatccattcagtacgcaggatactgacctagatctcgagatgctcgccccttatattcccatggacgacgacttccagctcaggtcattcgaccagctgtccccattggagtcctcctcagctagtcccgagtcagcaagccctcagtccacagttaccgtgttccaacagacacagattcaggagccaaccgccaacgcgacaactacaaccgcaaccaccgacgaactaaagactgtgaccaaggaccgcatggaagatatcaagatcctgatagcgagcccttcacctacgcatatccataaggagacaacgagcgctacatcctctccgtaccgagacacgcagtcgagaactgcttcacccaaccgcgctgggaagggcgttattgaacaaaccgaaaagtcccatccccgaagccccaatgttctgtccgttgcgctgagccagcggaccacagttcctgaggaagagctgaaccctaagatcctggcgctgcagaacgcccagcgcaagagaaagatggagcatgacgggtccctgttccaggctgtgggcattgggaccttgctccaacagcccgacgaccacgccgctacaacatcactgagctggaagagggtgaaggggtgcaagtcatccgagcagaacggaatggagcaaaagacgatcattctgatcccatctgacctcgcctgtcgcctactgggtcagtcaatggacgagagtggactgcctcaactgacgtcatatgactgtgaggtcaacgctccgatacaaggaagccgtaatttgctgcagggcgaggaactgcttagggcattagatcaggtgaac

SEQ ID NO: 33074 - DNA, 2478 bp, synthetic construct
  misc_feature 1..2478: note = Description of Artificial Sequence: Synthetic coding sequence
  source 1..2478: mol_type = other DNA
atggagggagctggtggtgcaaatgataagaagaagatctcaagcgagcggcggaaggaaaagagcagagacgccgcacgctcacgccgctctaaggaatcagaagtcttttacgaactcgcgcaccaactccccctgccgcacaatgtgtcgtcacatctggataaagcatctgtgatgagactgaccatctcgtacctgcgagtgcggaagctgctggatgctggggatctggacattgaagatgacatgaaggcccagatgaattgcttttacctcaaagcgctggacggattcgtgatggtgctcactgacgacggcgacatgatttacatctcagacaatgtgaacaagtatatgggactcacccaattcgaactcactgggcattcagtctttgactttacgcacccttgtgatcacgaagagatgcgcgaaatgctcacccatcgcaatggcctcgtgaaaaagggtaaagaacaaaacacccagagatcgttctttctgcgcatgaaatgtactctgactagccgcgggcgcaccatgaacattaagtccgccacctggaaagttctgcactgcaccggacacattcatgtctacgacactaattcaaatcagccgcaatgcggatacaagaagccacccatgacctgcctcgtcctcatttgtgaacccattcctcatccgtcgaatatcgagatccctctggatagcaagaccttcctgtcccgccactccctggacatgaagttttcttactgtgacgagcggatcaccgaacttatgggatacgagcctgaggagctgctgggtaggagcatttacgagtactaccacgcgctggactcagaccaccttaccaaaacgcatcatgacatgtttacgaagggacaggtcactaccgggcagtaccgcatgctggcaaaacgaggaggatacgtgtgggtggaaacccaagcgactgtcatctacaataccaagaatagccaaccccagtgcatcgtgtgcgtgaactacgtggtttcaggaattatccaacacgatctgatcttcagcctgcagcaaaccgagtgcgtgctcaagccagtcgagagctcggacatgaagatgacccagctgttcaccaaggtggaatccgaggacacttcaagccttttcgacaagctgaagaaagagccagatgccctgactctgctcgcaccagccgcgggagataccattatctcattggatttcggctcgaatgacaccgagactgatgaccagcagttggaagaggtgccgctgtataacgatgtgatgctcccatcccccaatgagaaattgcagaatatcaacctggctatgtcacccctgccaaccgccgagactccaaagccgctccggtcgtcggcagacccggccctgaaccaagaagtggctctgaagctggaaccaaatcctgaatccctcgagctctcgttcaccatgccgcagatccaggaccagactccgtccccgtcggatgggtcaacccgccagtcatctccagagcccaactcgccgtcagaatactgtttctacgtcgactccgacatggttaatgaattcaagctggaactggttgagaagctgtttgcggaggatactgaagccaaaaaccctttcagcacgcaggatactgaccttgacctggaaatgctcgccccgtacatcccgatggacgacgatttccagctccggtcgttcgaccaactctcaccgctggagagctcctccgcaagtcctgagtcagcgtccccgcagtccaccgtgactgtgttccaacagactcaaatccaagagccaactgcaaacgctaccactaccaccgcgactactgacgaactcaagactgtgactaaagacagaatggaggacatcaagatcctgatcgcttcgcctagccctacgcacatccacaaagagactacctcagctacgtcgtccccctacagggacactcagagccggacggcttcgccgaaccgggcgggaaagggagtcattgaacaaactgaaaagtcacacccgcgctctcctaatgtgttgagcgtggcgttgagccagcgtaccaccgtgccggaggaggaactgaacccaaagatccttgccctccagaacgcacagcggaaacgcaagatggaacacgacggctcactgttccaagcagtcggaatcggaaccctcctccagcagcccgatgaccatgcggctactacctcgctctcgtggaagagagtcaagggttgcaaatcgtcggaacaaaacggaatggagcaaaagaccatcatcctgatcccctcggacctggcatgtcgcctgctcggtcagtcgatggacgaatcgggactgccccagcttacctcgtacgactgcgaggtgaatgcgccgatccagggatcacgcaatctgctccagggcgaggagcttctgagggccctggaccaagtcaac

SEQ ID NO: 33075 - DNA, 2478 bp, synthetic construct
  misc_feature 1..2478: note = Description of Artificial Sequence: Synthetic coding sequence
  source 1..2478: mol_type = other DNA
atggaaggagcaggaggagctaacgataaaaagaaaatttccagcgaacgcagaaaggagaagtcccgggacgcggctagaagtcggcgcagtaaggagagtgaggttttttatgaactggctcaccaattgccgctgccacacaacgtctcctctcaccttgacaaggcatccgtgatgcggttaaccatctcctacctcagggtccgcaagcttctggacgctggtgatctagatatcgaggacgacatgaaggcccagatgaactgtttttatcttaaagcactggatggatttgttatggtgctgaccgacgacggagatatgatctacatttccgataatgtgaacaagtacatgggacttacacaattcgagcttactggccacagcgttttcgacttcacacatccgtgtgaccatgaagagatgcgagagatgctgacccatcgcaacggactcgtgaaaaaaggaaaagaacaaaatactcagagatcctttttcctcaggatgaaatgcacccttacaagccgaggcaggaccatgaatatcaagagcgccacttggaaggttctgcattgcactggtcacatccacgtgtatgatacgaatagtaaccagccacaatgtggatacaaaaaaccaccaatgacatgccttgtgctgatctgcgagccaataccccaccctagcaacatagagatcccacttgacagcaaaaccttcctttcacgccattccctggacatgaagttctcctattgcgatgagcgaatcactgagctgatgggatacgagcccgaggagctgttgggaaggtcaatctacgaatattaccatgccctcgactcggaccacctgaccaagacacaccacgatatgtttactaaaggtcaggtgactacagggcagtacaggatgctggcaaaacgcggcggatatgtctgggtggagacacaggcaaccgtgatctacaatacaaagaattcacagccacagtgtatcgtttgtgtaaactacgtcgtttcaggaataatccagcatgacctgatctttagcctccagcagacagagtgcgtactaaaacctgttgagagcagcgacatgaaaatgacacagctgttcacaaaggtggaatcagaagatactagcagtttgtttgacaaactgaaaaaggaacccgatgcgttgacccttttagccccagccgcaggagacactattatctcgcttgattttgggagcaatgataccgaaacggacgatcagcagctcgaggaagtaccgttgtacaacgatgtcatgcttccttcccccaacgaaaagctacagaacatcaacctcgcaatgagtccactgcccaccgctgaaacaccaaaacccctgagaagtagtgcagaccctgctctcaaccaagaagtggctctgaagttagaacccaaccccgaaagtctggaactgtctttcaccatgccacagatccaagatcagacacccagcccatcagacggcagcacgagacagagcagcccggaacccaacagcccatccgagtactgtttttatgttgacagcgatatggtcaacgaattcaagctggaactcgttgagaaattgttcgctgaagataccgaggctaaaaatcccttcagcactcaggatacggacttggacctagaaatgctggcaccctatatcccgatggatgatgacttccagctcagatcttttgaccagctgtcccccctggagtccagtagtgcctcgcctgagtcagcttcacctcagagtaccgtgaccgtgtttcagcagactcaaattcaagaacctaccgctaatgcgaccactactaccgccacgaccgacgaactgaagacagtgacaaaggaccggatggaggatatcaagatcctgatcgcaagcccatccccaacccatatccataaggagacaactagcgcgaccagctccccttatagagatacacagagtcgcacagcttctcctaatcgagcaggcaagggcgttatcgaacagacggaaaagagccacccaaggagtcctaatgtcctgagtgtggcactgtcccaacggactaccgtgccagaagaggaacttaaccccaaaattctggctttgcagaatgcgcagcgcaaacgtaagatggagcatgacggctcactgttccaggccgtgggcatcggaacccttcttcagcagcctgatgatcacgctgcaaccacttctctgtcatggaaaagggtcaagggatgtaaaagctcagaacaaaacggcatggaacagaaaaccatcatcctaatacccagcgatcttgcttgccgcctgctcggacaaagtatggatgagagcggactccctcaactcacctcttacgactgtgaggttaatgcaccaattcagggctccaggaacctgctgcaaggcgaggaattgttgagagcactggatcaagtgaat

SEQ ID NO: 33076 - DNA, 2478 bp, synthetic construct
  misc_feature 1..2478: note = Description of Artificial Sequence: Synthetic coding sequence
  source 1..2478: mol_type = other DNA
atggagggggctgggggggcaaacgacaaaaaaaaaattagcagcgagcgacggaaggagaagtctcgggatgccgcgagatctcgccgctcaaaagaatcagaggtgttttacgagctggcccaccaactgcccctacctcacaacgtatcttcccacctggataaggcaagcgtcatgcggctgactatctcttacctgcgggtacgtaagctgctggatgcaggagacctggatatcgaggatgacatgaaggcccagatgaattgtttctacctgaaggccctcgatggatttgtcatggtcttaactgatgatggcgacatgatctacatctcagacaacgttaataaatacatgggtctcacacagtttgaactgactggccattctgtttttgacttcactcatccttgtgaccatgaagagatgcgtgaaatgctcactcatagaaatgggctagttaagaaaggaaaggagcagaacacgcagcggtcattcttcctgcggatgaaatgcacactgacaagccgcggccgaaccatgaatattaaatctgcgacctggaaagtgctgcactgcactggccacatccatgtgtacgacacaaacagcaaccagccacagtgcggttataaaaagcctcctatgacctgtctcgtcctgatttgcgagcctattccacaccccagcaacatagagattccattagattctaagacttttctttccaggcattcactggatatgaagttctcctactgtgatgaacggattactgaacttatgggttacgaacctgaggagttgcttgggagaagtatctatgagtattaccacgccctggactctgaccatctgactaagacacaccacgatatgttcactaaggggcaggttacaactgggcagtataggatgctcgcaaagcgcggggggtatgtctgggtagagactcaggctaccgtgatttataacacgaaaaactcgcagccacagtgtatcgtctgtgtgaattatgtggtttccggaatcatccagcacgatctaatattctccttgcagcaaaccgagtgtgttctgaagcccgtcgagagcagtgatatgaaaatgacccagttgttcaccaaagtggagtcagaagatacctcttcattgttcgacaaactgaaaaaagagccagatgccctgactttactagctccagccgccggcgacactatcatatccctcgattttggatccaatgacacggaaaccgatgatcagcagctcgaagaagtaccactctacaatgatgtgatgttgccctccccaaacgaaaagctgcagaatatcaatcttgccatgagccccctgcctactgccgaaacgcccaagcctctgcgctcaagcgcagatcccgccctgaaccaggaagtggctctgaagcttgaacctaatcccgaaagcctggaactaagcttcaccatgcctcagatacaagaccagacacctagcccctctgatgggagcacccgacagtctagcccagagcccaacagtcctagcgaatactgcttctatgtggatagcgatatggtaaacgagtttaagttagagcttgtggagaaactgttcgcagaggataccgaagctaagaacccatttagcacacaggacaccgatttagatctggagatgctcgccccatacattcctatggacgacgatttccagttgaggtctttcgaccagctatcgccactcgaatcttcgagcgccagccccgagtccgctagccctcagtctacagtaactgtcttccagcagactcagatccaggagccaaccgccaacgccactactaccactgccacaactgacgaattgaagaccgttacaaaggatcgtatggaggatatcaaaatattgatcgctagtcccagccccacccacatacataaggagaccacctccgcaacctctagcccataccgggacacacagtcgaggacagcgagccccaaccgggccggcaagggcgtaattgagcagacagaaaaaagccacccccgctcgcccaatgtgttgtctgtggccctaagtcagaggaccacggtgcccgaggaagaactcaacccgaagattctggccttgcaaaatgctcagcgtaagaggaagatggaacatgatggctctctgttccaggctgtcggaatagggaccctcttacaacagccagatgaccacgccgccacgacatctcttagttggaagcgggtcaagggctgcaaaagttcggaacagaacgggatggaacagaaaaccatcattctgattccatcagaccttgcatgcagactcctcgggcagagcatggacgagtcgggtctgcctcaactcacttcctatgactgcgaggttaatgccccaatccaggggtctcgtaatctactccagggtgaggaacttctgagggcattggaccaggttaac

SEQ ID NO: 33077 - DNA, 2478 bp, synthetic construct
  misc_feature 1..2478: note = Description of Artificial Sequence: Synthetic coding sequence
  source 1..2478: mol_type = other DNA
atggagggggcaggaggcgctaacgacaagaaaaagatcagctcagaacgccgaaaagagaagtcccgggacgcggcacgctccagaaggtcgaaggagtcagaggtgttttatgaactggcccatcagctgccgctgccgcacaatgtctcaagccatttggataaagcctcagttatgcggctgaccatctcctatcttagagtgcggaagctcctggacgcgggcgacctcgacatcgaagatgatatgaaggcacagatgaattgcttctatctgaaggccctggatggtttcgtgatggtgctgactgacgatggagatatgatctacatctccgacaacgtgaacaaatacatggggctgacccagttcgagctgaccgggcattccgtgttcgacttcactcatccgtgtgaccacgaggagatgcgggagatgcttacccaccgcaacggcctggttaagaagggaaaggagcagaacacccaacgcagcttcttccttcggatgaagtgcacgctcacctcgcgcggacggactatgaatatcaagagcgccacttggaaggtgctgcactgcactggccacattcatgtgtacgacactaactcgaaccaaccccaatgcggatacaagaaaccgccgatgacttgcctggtcctgatctgtgaaccgattccacacccttccaatatcgaaatcccactggacagcaaaaccttcttgtcacgccactcactcgacatgaagttctcctactgcgatgaaaggatcactgagctcatgggatacgaaccagaggaactgctgggacgctccatctacgagtactaccacgcactcgactcggaccaccttactaagacccaccatgatatgtttaccaagggtcaagtgaccaccggccagtaccggatgttggcgaaaagaggaggatacgtctgggtggaaacccaagccaccgtgatttacaataccaagaactcacaaccgcagtgcatcgtgtgtgtgaattatgtggtgtccggtatcatccagcatgatctgatcttctccctgcagcaaaccgaatgcgtgctcaagccggtcgaatcgagcgatatgaagatgactcagctctttaccaaagttgagtcggaggatacctcgtcgcttttcgataaactcaaaaaggagccagacgccctcactctgttggcgcctgccgcgggagataccatcatctcactggacttcggctcgaatgataccgagacggacgaccaacagctggaggaggtgccgctgtacaacgatgtgatgctgccctcgccaaatgagaagctgcagaacataaatctcgcgatgtcccccctgcctacggcggaaactcccaagccgcttcggagcagcgccgacccagcgcttaaccaggaagttgccctgaaattggaaccaaacccggaatcgctggagctgtccttcaccatgccacagatccaagaccaaactccatccccaagcgacgggtcaacccgacaatcgagcccagagccgaactccccttcagaatactgcttctacgtggattccgacatggtgaacgaattcaagctggagctcgtggaaaaactgtttgcagaagataccgaagctaagaacccgttctccacgcaggacaccgacttggacctcgagatgctggcgccttacatccctatggacgacgatttccaattgaggtccttcgaccagctgtcccctctggaaagctcatccgcctccccggaaagcgcatcaccacaaagcaccgtgacggtgtttcagcagactcaaatccaggaaccgacggcaaatgccaccaccactactgctaccaccgacgaactcaaaactgtgactaaggaccgcatggaggacatcaagatcctcatcgccagcccgtcgcctacgcatatccacaaagaaaccacctcagctacttcgagcccgtaccgggacacccaatccaggaccgcctcgcccaaccgcgcgggcaaaggagtcattgaacaaaccgagaaatcacacccaaggagcccgaacgtgctgtcggtcgccctctcgcagcggactacggtgccggaagaggagctgaatccgaagatcctcgcactgcagaacgcccagcgcaagaggaaaatggaacacgatggatcgctgttccaggcagtgggtatcggaacgctgctgcaacagccggacgaccatgcagcaactacttctctgtcatggaagcgcgtgaagggctgtaagtcatcggaacagaacggaatggaacaaaagaccatcatcctgatcccgagcgacctcgcctgccgcctccttggacaaagcatggatgaatccggacttccgcagctgacctcatacgactgtgaggtgaatgcacctatccagggatcccggaacctgctccagggcgaggaactcctgcgcgccctggaccaggtgaac

SEQ ID NO: 33078 - DNA, 2478 bp, synthetic construct
  misc_feature 1..2478: note = Description of Artificial Sequence: Synthetic coding sequence
  source 1..2478: mol_type = other DNA
atggagggcgcaggcggggccaatgataaaaaaaaaataagtagcgaacggcgcaaagaaaagtcccgggacgctgcaagatctcggaggtccaaagagagcgaagtgttctacgaattggcgcatcaacttcccctgccccacaacgtttccagccacctcgataaggcctcagtaatgagacttacaataagctacctccgcgtgcgcaagctcctggatgctggcgatctggatatcgaggacgatatgaaggcccaaatgaactgtttttatcttaaagccctcgacggattcgtcatggtcctgacagacgacggcgatatgatttatatctctgataacgtcaacaagtatatgggcctgacccagtttgagctgacaggccacagtgtgttcgattttactcacccatgcgatcatgaggaaatgagagaaatgctgacccaccgcaacgggcttgtcaagaaaggcaaggagcagaacacccaacggtccttcttcctgagaatgaagtgcacactgacttccaggggcagaacgatgaacattaagtcagcaacctggaaggtgctgcactgcactggacacatccacgtttatgataccaactccaaccagccacagtgtgggtacaagaaaccgcccatgacgtgtttggtactgatctgcgaacctatcccacacccaagcaatatcgagatccctttggactcaaaaacctttctgtccaggcactcactcgacatgaagttttcttattgcgacgaaagaatcacagagctgatgggctatgagcccgaggaactgcttggcaggtccatctacgagtactatcatgctctggacagcgaccatctcacaaaaactcaccacgacatgttcactaagggtcaagtgacaactggccagtacagaatgctcgcaaagcggggagggtatgtttgggtagagacccaggcaaccgttatatataacacgaaaaattcccagccccaatgcattgtgtgcgtgaactacgtggtgagtggcattatccagcatgaccttatatttagcctgcaacagactgaatgcgttctgaagcccgtagaatcatcagatatgaaaatgactcagctttttaccaaggtggagagcgaggacacctccagtctgttcgataagttgaagaaggaaccggatgcactgaccctgctggccccggccgcgggagataccatcatcagtcttgattttggatctaatgacaccgaaacagacgaccagcagctcgaggaagtccccttgtataacgatgtgatgctgcctagccccaatgagaagctgcagaacattaatctggcaatgtcacccctgccgaccgcagaaacccccaagcccctgcggtccagcgctgaccctgctctgaatcaggaggtagccttgaagttggaacccaaccccgagtcacttgagctgtcatttactatgccccaaatccaggatcagacccccagcccctccgacgggtctaccaggcagtctagccctgagcccaacagcccaagcgagtattgcttctatgtggatagcgacatggtcaacgagttcaagcttgagctggtggagaaactgtttgcggaggacaccgaggctaaaaatccattctccacccaagacactgatttggacctggagatgctggccccttacatcccaatggatgatgactttcagttgcgatccttcgaccagcttagcccgctggagtcatcctctgcctcccccgaaagcgcatcaccacagtccaccgtcacggtctttcagcagacacagatccaggaaccgaccgctaacgctacaacaacgaccgccacaaccgatgagctgaaaactgttacaaaagatcggatggaggacatcaaaattttgatcgccagtcccagccccacacacatacataaagaaactacctctgctacaagctctccctatagggatactcagtccaggacagcgagccctaaccgcgcaggaaagggagtcatcgagcaaaccgagaaatcccatccgaggtcaccaaatgtcctcagcgtggccctgtcacagagaacaaccgtgccggaggaggagctgaaccctaagattttggcactgcaaaatgcacagagaaagcgcaagatggaacacgatgggtccctgtttcaggcagtgggaatcgggaccctgctgcagcaacctgatgaccatgccgcgacgacaagtttgagttggaaaagggtaaaagggtgtaaaagcagcgaacaaaatggtatggagcaaaaaactattattctgatcccctctgatctggcatgtcgcctcctgggtcagagtatggatgagtcaggtctcccacaacttacaagttatgattgtgaagtaaatgctcccatccagggctctcgaaacctgctccagggtgaagaattgcttcgcgcactggatcaagtcaac

SEQ ID NO: 33079 - DNA, 2478 bp, synthetic construct
  misc_feature 1..2478: note = Description of Artificial Sequence: Synthetic coding sequence
  source 1..2478: mol_type = other DNA
atggagggcgctggaggagctaacgataagaagaagatatcgagcgagagacgcaaggagaaatcccgggatgctgcgaggagcaggaggagtaaagagagcgaagtgttctatgagttagcccatcagctcccattacctcataatgttagtagtcacctggacaaagcttctgtgatgagactcaccatctcttacctccgggtgcgcaaactcttagacgctggggacctggatattgaagatgacatgaaggcacagatgaattgcttttacttgaaagcactggacggttttgttatggtgctcaccgacgatggagatatgatttatataagcgataatgtgaataagtacatgggcctgacgcagttcgagctcacagggcactccgtgtttgacttcacgcacccgtgtgatcacgaggaaatgagagagatgttgactcatcgtaatgggttggtcaagaaaggcaaggagcaaaatacgcaacggagtttttttctgagaatgaaatgtaccttgacctctaggggccgcacaatgaacattaaatcagcaacatggaaggtactgcactgcaccggtcacattcatgtttacgacaccaacagcaaccaaccccagtgtggctacaagaaaccaccaatgacctgcctcgtgcttatatgcgagcctatcccacacccatctaacatcgagatccctttagactccaaaacgtttctgagtcggcactctctcgatatgaagtttagttactgtgatgagcggatcacagagttaatgggatacgagccagaggaactgctgggccgcagcatctatgaatattatcatgcgctagactctgaccatctaactaagacccaccatgatatgtttactaagggtcaggttaccactgggcaataccgcatgcttgccaagcgtggtggctacgtttgggtcgaaactcaagccaccgtgatttacaataccaaaaattcacagccccagtgtatagtgtgtgtgaactacgtggtttccgggataattcaacacgacttaattttttccttacaacagacagaatgcgtgctgaaacctgtggagtcttcagacatgaaaatgacccagctgtttacaaaagtcgaatcagaagatacgagctcactgtttgataagctgaagaaggaacccgatgcattgactctccttgcacccgcagccggtgatacaataatctctttggatttcggtagtaacgatactgagactgatgaccagcagctcgaagaggtgcctctgtataacgacgttatgctgccatctcctaatgagaagcttcaaaacattaacctggctatgtctcctctgccaaccgctgaaactcccaagccattgcgcagtagcgccgacccagccttaaatcaggaagtagcgctaaagcttgaaccaaatccggaatccctggaactcagttttacgatgcctcagattcaggatcagactcccagcccatcagatgggagtacacgccagtcctctcccgagccaaatagcccttctgaatactgcttttacgtcgattccgacatggttaatgaattcaagctggaacttgtggaaaagctctttgccgaagacactgaggccaaaaatccattttctactcaggacacagatcttgatctggagatgctggcaccctatatcccaatggatgatgactttcagttgcgaagctttgatcagctgtcaccactggaatcctcttccgcctccccggagtctgcctctccacagtcaaccgtaaccgttttccagcaaacacaaattcaagaaccaacggctaatgcaaccacgacaactgctaccactgatgagcttaaaaccgttaccaaggaccgcatggaggacataaagatactgattgcttctccttcccctacccacatccacaaagagaccaccagtgccacaagcagcccataccgagatactcagagtcgcactgccagtcccaatagagctggcaagggggtgatcgagcagacagaaaagtcccatccacggtcccccaatgtactctcagtggccctctcacagcgaacaaccgtaccggaagaggaactgaatcccaagatcctggcactgcagaacgctcagcggaagagaaaaatggaacatgacggttccctatttcaagcggtcggtatcggtaccctcctgcagcagcctgacgatcacgccgcaactacctcactctcttggaagagggtcaagggctgtaagagctctgagcagaacggaatggaacagaagacaattattttgattccatctgatctggcgtgtcgtctacttgggcagtctatggacgaaagcggcctcccacagttaaccagttatgattgcgaagtgaatgcccccatccagggctcccggaacctgctccagggagaggagttactgcgggctctggaccaggtgaac

SEQ ID NO: 33080 - DNA, 2478 bp, synthetic construct
  misc_feature 1..2478: note = Description of Artificial Sequence: Synthetic coding sequence
  source 1..2478: mol_type = other DNA
atggaaggagccgggggtgccaatgataagaagaagatatcctccgaaagacgcaaggaaaagagccgggacgccgcaaggtcgcggcggagcaaggaatcggaagtgttctacgagctggcacatcagcttccactgccacacaacgtgagcagccatctggacaaggcatcggtcatgagacttactatttcgtacttgagagtgcgcaaacttctggatgcgggtgaccttgacatcgaggacgatatgaaagcacagatgaattgcttctaccttaaggcccttgatggtttcgtgatggtgctcaccgacgacggagatatgatctacatttcagataacgtgaacaagtacatgggacttacgcaatttgagcttaccggccattcggtgtttgactttactcatccgtgcgaccacgaggaaatgcgtgaaatgctgacccacagaaatggactcgtgaaaaaggggaaggaacagaacacccaacgctcgtttttcctgcgcatgaagtgtactcttacttcccgcggcaggaccatgaatatcaagtcggccacctggaaagtgctccactgcacgggccacatccacgtgtacgataccaattcgaaccaaccgcagtgtggatacaaaaagcctcccatgacgtgtctcgtgctgatttgtgagcctatcccacacccgtccaacattgaaataccactggattccaaaacttttctgtcaagacatagcctggatatgaagttttcatactgcgacgaacggatcaccgagttgatgggatacgaaccagaagaactgcttggtcggagcatttacgaatactaccacgcactggattcagatcacttgaccaagacccatcacgatatgtttaccaagggacaggtgaccaccggtcaataccgaatgctcgcgaagaggggaggctatgtgtgggtcgaaacccaggcaactgtcatatacaatactaaaaactcacagccccagtgcatcgtgtgtgtgaactacgtggtgtcaggtatcatacagcacgacctgattttcagcctgcaacaaaccgaatgtgtgctgaagccggtggaatcatccgatatgaaaatgactcagctgtttactaaggtggagagcgaagatacttcgtcattgtttgataagctcaagaaagaacctgatgcactgaccctgttggcgccggccgcgggcgacactattatctccctggattttggctcgaacgataccgaaaccgatgatcagcaacttgaagaagtgcctctttacaacgacgtgatgctgccgtcccctaacgaaaagctgcaaaacataaaccttgctatgagcccgctcccaactgcagaaactcccaaaccactccggtcatcagcagatcctgcacttaatcaggaagtggcacttaagctggaacctaatcctgaatcactcgaattgtcatttacgatgcctcaaattcaagatcagaccccgtccccctccgatggcagcacccggcagtcctcgcccgagcccaactcaccctcggaatactgtttttacgtcgactccgatatggtgaacgagttcaagctcgagctggtggagaagctgtttgctgaagataccgaggccaaaaaccccttcagcacccaggacacggatcttgaccttgagatgctcgcaccttacattcctatggacgacgattttcaacttcgctccttcgatcaactttccccactcgaatcgtcaagcgcatcgcctgaaagcgccagcccacaatctaccgtcacggtgttccaacagactcagattcaagaacctactgcaaacgccaccaccaccacggcaaccactgatgaacttaaaaccgttaccaaggatcggatggaggatatcaaaatactgattgcaagcccttcccctactcatattcacaaggaaaccacgtctgcgacgtcgagcccgtacagagacactcaatccaggaccgcctcaccaaatagggcaggaaagggagtgatcgaacaaactgaaaagtcccatcccaggtccccaaacgtgctgagcgtggcactgagccagcggactaccgtgccagaggaagaactgaatccaaagatcctcgcactgcaaaacgcccagagaaagaggaagatggaacatgacggctctcttttccaggccgtgggaattggaacccttcttcagcaacccgacgaccacgcggcaacgactagcttgtcctggaagcgagtcaagggatgtaaatcttcggaacaaaacggcatggaacaaaagaccattatacttattccgtcggaccttgcatgtcgactcctgggccaatcgatggacgaatcgggtctgccacaactgacttcgtacgactgtgaggtcaacgcaccaatccagggatcccgtaacctgcttcagggcgaggagctgctgagggcactggatcaagtcaac

SEQ ID NO: 33081 - DNA, 2478 bp, synthetic construct
  misc_feature 1..2478: note = Description of Artificial Sequence: Synthetic coding sequence
  source 1..2478: mol_type = other DNA
atggagggggccgggggggccaatgacaagaaaaaaatctccagcgagcggagaaaggaaaaatcccgggatgctgctaggtcccgacgctccaaggagtcagaggtgttttacgaattggcacaccagctccccctgcctcataatgtgtcctcccacttagacaaagccagcgttatgagacttacgatttcttatttgagagtaagaaagctcctggatgccggcgacctggatatagaagatgacatgaaggcgcagatgaactgcttctaccttaaggctctggatggcttcgtgatggtgctgacggacgatggagacatgatttacattagcgataatgtcaacaaatacatgggcctaactcagtttgagctaactggacattcagttttcgacttcacacacccatgcgatcatgaggagatgcgggaaatgttaacacatcgcaacgggctggtcaagaaggggaaggagcaaaatacccagcggagcttcttcctgcggatgaagtgcaccttaacaagcagaggcaggacaatgaacattaaatcggcaacatggaaggtccttcattgcactggtcacatccacgtctatgacaccaatagcaaccagccccagtgtggttacaagaaaccacccatgacttgcctggtcctgatctgtgagcctattccccatccttcaaacatagagatcccgttagactccaaaactttcctgtcccgccactctcttgatatgaagttttcgtactgcgacgaacggattaccgagttgatggggtatgagccagaagaactgcttggcagatccatttacgaatattatcatgcactggatagcgaccacctcacaaagactcatcatgacatgttcacaaagggccaggtcactactggccagtatcgcatgctcgccaagcgcggcggatacgtctgggtggagactcaggcaacggtgatctataatacaaagaacagtcagccgcaatgtatcgtatgtgttaactatgtggttagtggtattattcaacacgatctcattttttcacttcaacagacggagtgcgtgctcaagcctgtcgagtccagcgacatgaagatgactcagctctttaccaaggtggagagcgaagacacatcaagcctttttgacaaactgaagaaggagccagatgctcttacactgctggcgcccgccgccggggatacgataatctctttagacttcggctcgaacgatactgagacagatgatcagcagttagaggaggtacccctgtataatgatgttatgcttccatccccgaacgagaaactgcaaaatatcaacttggctatgtcccctctgccaaccgccgagaccccaaagcccctgaggtcttcagcagacccagcccttaatcaagaagtcgccctgaagttggaaccgaaccctgagagcttggagctgtccttcacgatgccacaaatccaggaccaaacaccttcccccagtgacgggagcacgcggcagtcttcccctgagcctaattcaccttctgagtactgcttctacgtggacagcgacatggtgaacgagttcaagttggaattggtggagaaattatttgcggaagatacagaagccaagaaccctttttcgacgcaggatacagatctggatttggaaatgctggctccttatatcccgatggatgatgactttcaactgcgttccttcgatcaactttcacccttggaaagctctagcgcgagccctgaatctgccagtccgcagtccaccgtgaccgtgtttcagcagacccagatccaagaaccaacagctaatgccacgaccaccaccgcaactacagacgaactgaagaccgttaccaaggacaggatggaagacattaaaatattgatcgcaagcccttcgccaactcatattcacaaggaaacaacatccgcgacgagcagtccctatcgcgatacccagtcacgaacagccagccctaatagagctggaaaaggcgtaattgagcagactgaaaagtctcacccgcgctctccaaatgtcctcagtgtcgcccttagccaacgcacgactgtgcccgaagaggagctcaacccaaagatcctcgccctgcagaatgctcagcgcaaaaggaaaatggagcacgacgggtctttgtttcaagctgtcgggattgggactctgctgcagcagccagatgaccacgccgcaaccaccagtctgagctggaagagagtgaagggctgtaagtcctctgagcagaacggaatggagcagaagacaattattctcataccatctgacctggcctgtcgtctgctcggccagagcatggacgagtctggactgcctcaactgacctcttacgattgcgaagtgaatgcaccaatccagggaagtcggaatctgctacagggcgaggaacttctcagggctttagaccaggtaaat

SEQ ID NO: 33082 - DNA, 2478 bp, synthetic construct
  misc_feature 1..2478: note = Description of Artificial Sequence: Synthetic coding sequence
  source 1..2478: mol_type = other DNA
atggaaggggctggtggagctaatgataagaagaagatctcatcggagagacggaaagagaaaagccgggacgcagcccgctcccgccggagcaaagagtccgaagtgttctacgagctggcgcaccaactcccactgccgcacaatgtctcatcacatctggataaagcctccgtgatgcggcttaccattagctatcttcgcgtgagaaaactgctggacgccggcgaccttgatatcgaagatgacatgaaagcgcaaatgaattgtttctatctgaaagcgctggatggattcgtgatggttctcactgatgacggcgacatgatctacattagcgacaacgtcaacaagtacatggggctgactcaattcgagctgaccggacattccgtctttgacttcactcacccctgcgaccacgaagaaatgagggaaatgctcacccaccgcaacggactggtgaagaagggaaaggaacagaacacccagcgttcctttttcttgcggatgaaatgcacccttactagcagaggccggacgatgaatattaagtccgccacctggaaagtcttgcattgcactggacacatccacgtctacgataccaactcaaatcagccgcaatgtggatacaagaagccgccgatgacctgtctcgtgttgatatgcgaaccgatccctcacccatcgaacatcgaaattccactcgacagtaagacttttctgtcccggcacagcctggatatgaagttctcctactgcgacgaacgcatcaccgagctcatgggatacgagccagaagagctgctgggcaggtccatctacgaatactaccacgccctggacagcgatcatctgaccaagacccatcatgatatgtttaccaagggacaggtcacgaccggccaataccgcatgctggccaagcgaggaggttacgtgtgggtggagactcaggcaacggtcatctataacactaagaactctcagccgcagtgtatcgtttgcgtcaactacgtcgtgtcgggtatcatccagcacgatctgatcttttcgctgcagcagactgaatgcgtgcttaagcctgtggaatcctcggacatgaagatgacccagctgttcaccaaggtggaatcggaggacacctcatctctgttcgacaaactcaagaaggaacctgacgctctgaccctcctggcgccggcagcaggagacaccatcatctcactcgacttcggaagcaatgacactgagactgacgatcagcagttggaggaagtgccgctctacaacgacgtgatgctgccttcaccaaatgagaaattgcaaaacatcaatcttgccatgtcaccgctgcctacggccgaaaccccgaagccactcaggtcgagcgcagaccctgcccttaaccaggaggtggctttgaagctggagccgaatcccgagagcctcgagctctccttcaccatgccacaaattcaagaccaaactccgtccccgtcggacggatcaactagacaatcatcccctgagccgaactcgccatccgaatactgcttctacgtcgatagtgacatggtgaacgaattcaagctggaactggtggagaagctgttcgcagaggacacggaggcgaagaatccatttagcacccaagatactgacctggaccttgaaatgctcgcaccctacatcccgatggacgatgactttcaattgagatcgttcgaccagttgtcccccctcgagtcaagctctgcgtcgccagaatccgcaagcccacagtccactgtcactgtgttccagcagacgcaaatccaagagcctaccgccaacgcaactactactacggcgaccaccgacgaactcaaaaccgtgaccaaggatcgcatggaagatatcaagattctgatcgcttcgcccagcccgactcacatccataaggagactacttcagccacttcgtcgccgtaccgggacacgcagtcgcggaccgcttcaccgaatagagcggggaagggggtgattgagcaaaccgagaagtcccatccgcgctcgcctaacgtgctctccgtggccctgtcgcagcgcactaccgttccagaagaagaactgaatcccaagatcctcgctctccagaacgcccaacgaaagaggaaaatggagcatgatggatccctgttccaggcggtcggtatcggaactcttctccagcagccggatgatcacgccgccaccacctcgctgtcatggaaaagagtgaagggttgcaaatcgagcgagcaaaacggcatggaacagaaaactatcatcctgatcccatcggacctcgcctgccgcctgctcggacagtcaatggatgaaagcggcctcccccagctgacctcgtacgattgcgaagtgaacgccccgatccagggcagccggaacctgctgcagggggaagaactgttgcgcgcgctggatcaggtgaac

SEQ ID NO: 33083 - DNA, 2478 bp, synthetic construct
  misc_feature 1..2478: note = Description of Artificial Sequence: Synthetic coding sequence
  source 1..2478: mol_type = other DNA
atggaaggcgcagggggggccaatgataaaaagaagattagctccgagcgaaggaaggagaagagtagggacgcagctcggtctcgacgctctaaagaatctgaggtgttctacgagctagcccatcagctgcctctgccacacaacgtgtcctctcatctggataaggcatcagtcatgagactgacaattagttacctgcgggtcagaaagctcctcgatgcaggagatctggacattgaggacgatatgaaggcccagatgaactgcttctacctgaaggccctggacgggttcgttatggtgctgacagatgacggcgacatgatatatatctcagacaatgtgaacaaatacatgggcttaacacagttcgaactcaccggtcattctgtctttgatttcacccacccatgcgatcatgaggagatgagggaaatgctgactcaccgcaacggtctggtaaaaaagggcaaagagcagaacacacagcgatctttctttctaagaatgaaatgtaccctgacaagtcggggacgcactatgaacatcaagagcgccacttggaaggtcctgcactgcaccggccacatacatgtgtacgatacaaacagtaaccaacctcagtgtggatataagaagccaccaatgacctgcctagttctgatatgcgagcctattcctcacccatctaatattgaaattcctcttgactctaagactttcctatcacgacattccctcgacatgaaattcagctattgtgatgagaggatcaccgagttgatgggctatgaacccgaggagctgcttggcagatctatttacgagtactaccacgcactggatagtgatcaccttaccaagacccatcatgacatgtttactaagggacaggtgaccactggccagtacagaatgctagccaagcgaggtggctatgtgtgggttgaaacccaggcaacagtgatttataacaccaagaattcacaaccacagtgcatagtgtgcgtgaactacgtcgtaagtggaatcatacagcacgacctgattttcagcctacagcagacagagtgcgttcttaagccagtagaaagcagcgatatgaaaatgactcaactattcaccaaggtggaaagcgaggatacatcttcactattcgacaaactgaagaaggaaccagacgccctcactctactggcccccgccgccggggacaccataatctccctggattttggctctaacgatactgagaccgacgatcagcagctggaggaggtgccactttataacgacgttatgctcccatcaccaaatgagaaattacagaatattaacctggccatgagccccctgcccaccgccgaaaccccgaagccacttaggtcaagtgcagaccctgctttaaatcaggaggttgccctaaaactcgaaccaaatcctgagtcattagaactatcctttaccatgccacagattcaggatcagaccccaagcccatccgacggcagcacaaggcagagcagccctgagcctaactctccctctgagtactgcttctacgtggacagcgacatggtgaatgaattcaagctggaattggttgaaaagctgtttgccgaagataccgaagcaaaaaatccatttagtacccaggatacagatctggatctagagatgctggccccatacatacccatggatgatgatttccaactgcgaagcttcgaccaactatcccctctagagtctagttctgctagtcccgaatcagcatccccacagtctacagtgaccgtgttccagcagacccagatacaggaacctaccgccaatgctacaacaaccaccgctacaaccgacgagctgaagaccgtcaccaaggaccgtatggaggacatcaaaatcctgattgccagccccagtcccacccatatccataaagaaacaacatcagccacctctagtccatacagagacacacagtctagaaccgccagcccaaacagggcaggaaaaggggtgatagagcagacagaaaagtcccacccaaggagtcccaacgttttatctgtggctctttcacagaggaccaccgtccccgaagaagagttgaatcctaaaatcttggccctccagaacgctcagcgaaagcgcaaaatggaacacgacggctccctttttcaggctgtcggaattggtactctactccaacagcccgacgatcatgcagctacaacttcattgtcctggaaacgtgtcaaggggtgtaagtcctcagaacaaaatggcatggaacagaaaaccattattttgattccatctgatctggcttgtcggctcctgggacagagtatggatgagtctgggctgccccaactgacttcctacgactgcgaagtcaacgctccaatccaaggttcacggaatttgctgcaaggagaggagctgctacgcgcactggatcaggttaat

SEQ ID NO: 33084 - DNA, 2478 bp, synthetic construct
  misc_feature 1..2478: note = Description of Artificial Sequence: Synthetic coding sequence
  source 1..2478: mol_type = other DNA
atggagggggccggcggagcgaacgacaaaaagaagatttcctctgagcggagaaaagaaaaatccagggacgctgctcggtcaaggagaagcaaggagagcgaagtgttctacgaactcgcgcatcagctgccgctcccccataacgttagttcccatttagataaagcttcggtgatgagactgaccatctcctatctacgggttcgcaagctgctggacgccggagatctggacatagaggatgatatgaaggcccagatgaattgcttctacttgaaggcactcgatggcttcgtcatggtgctgaccgacgatggagatatgatttacatttctgataacgtaaacaagtacatgggcctgactcagtttgagctgactgggcattctgtgtttgattttacgcatccgtgcgaccacgaagaaatgcgagagatgctgactcataggaatggtctggttaagaaagggaaggagcagaacacccagcgatctttctttctcagaatgaagtgcactctgaccagcagaggtcggaccatgaatataaagagtgccacgtggaaggtgctgcactgtaccggtcatatacacgtctatgataccaattcaaaccagcctcagtgtggctataagaagccccccatgacgtgcttagtactcatatgtgaacccattcctcacccatccaacatcgaaattccactagattctaagactttcttatcgaggcattcactggacatgaagttcagctactgtgatgaacggataacagagttgatgggctatgagcctgaagagctgctggggaggtctatctatgagtattaccacgcgttggactcagatcacctcaccaagacacaccatgacatgttcaccaagggacaggttactactggccaataccgcatgctggctaagcgggggggctacgtgtgggtggaaactcaggcgactgttatctataacacgaaaaatagtcagcctcaatgcattgtatgcgtgaactacgtggtgagtgggattatccagcacgatttgatttttagtctgcagcagaccgaatgtgtgctaaaacccgtggaaagctctgatatgaaaatgacacagctgtttacaaaagtggagtcagaagataccagttctctatttgacaaactcaaaaaggaacccgatgccctaaccctactagcccccgctgcaggcgatacaattatcagcctagacttcggttccaatgataccgaaaccgacgaccaacagctcgaagaagttcctttatataatgatgtgatgctcccctccccaaacgaaaagctgcagaatataaacctcgctatgtccccactgcctaccgccgaaacgccaaagcccctccgcagtagcgcagacccagctctgaatcaggaggtggcattgaaactcgaacctaatcctgagagtctcgagttgagttttactatgccacagatacaagatcagacaccatcaccctcggacggctccacacggcaaagctcccctgaaccaaattctccgtctgagtattgcttttacgtagactccgacatggtcaacgaattcaagctggagttggtcgaaaagctctttgctgaagatacagaagccaaaaatccgttctcaacacaggacacagacctggatctggagatgctggcaccatacatacccatggacgatgatttccaactgagaagtttcgaccaactgtcccctttggagagcagctcagcatcacctgagtcagccagtcctcagtctaccgtgactgtattccagcagacacagatccaggaacctacagctaatgctactactacgaccgctacaacggacgagctgaaaacagtgaccaaagaccgaatggaggacatcaagattctgatcgccagcccttctccaacccatatccacaaagaaactacaagcgccacttcaagtccctacagggatactcaatctagaacggcttcccccaacagggctgggaagggggttatagagcagacagaaaaatcgcacccaaggagccctaatgtgctcagcgttgccctttctcagaggaccactgtccccgaagaagagctgaatcctaaaatcttggcccttcagaacgctcagagaaagaggaagatggaacacgatggaagtctcttccaggccgtggggataggcacactgctgcagcaaccagatgatcatgcagccaccaccagcttgtcctggaagcgagtgaaagggtgcaagagctccgaacaaaatggcatggagcagaaaaccattatcttgatcccatccgatcttgcctgcaggctgctcggacaatcgatggacgagtcgggcctgccgcaactgaccagctacgactgcgaggtgaatgctccaatccaaggctctcggaacctgctgcagggagaggagctgctcagggctctggatcaggtcaat

SEQ ID NO: 33085 - DNA, 2478 bp, synthetic construct
  misc_feature 1..2478: note = Description of Artificial Sequence: Synthetic coding sequence
  source 1..2478: mol_type = other DNA
atggagggcgccggcggagccaatgacaagaaaaagatctccagcgaaagacggaaagaaaagtcgcgggacgcggcccgctctcgccggagcaaggaatctgaggtgttctacgaattggcgcatcaactgccgcttccgcataacgtctcgtcgcacctggataaagctagcgtgatgcggctcactatctcctacctgcgggtgcgcaagctcctcgacgcaggcgatctcgatatcgaagatgacatgaaggctcagatgaattgcttctaccttaaggcactggacgggttcgtgatggtgctgactgacgacggagatatgatctacatctccgacaatgtgaacaagtacatgggactcacgcagttcgagttgaccggacactccgtctttgacttcacccatccgtgcgatcacgaggaaatgagagagatgctgacccacagaaacgggctggtgaagaagggtaaggagcagaacactcaaagatccttcttcctcagaatgaagtgtaccctgacctcaaggggacgaacgatgaacattaagtcggcgacttggaaagtcctccactgcaccggccatatccatgtgtacgacaccaactcaaatcagccgcagtgcggatacaagaaaccgccaatgacttgcctggttctcatctgtgagccgatcccgcacccaagcaatatcgaaatcccgctggattccaaaaccttcctgtcgcggcactccctcgacatgaagttttcatactgcgacgaaaggattactgaactgatgggctacgagccagaagaactgctgggaaggtcgatctacgagtactaccacgctttggactccgaccacctcacgaaaactcaccatgatatgttcactaagggccaggtcacgaccggacaataccgcatgctggccaaacgcggcgggtacgtgtgggtggaaactcaggctacggtgatttacaatactaagaattcccagcctcaatgcatcgtgtgcgtcaattacgtcgtgtcgggaatcatccagcacgacctgatcttctcactgcagcagactgaatgcgtcttgaagccggtggagtcctcggacatgaaaatgacgcagctgttcaccaaggttgagtcagaggacacctcatcactgtttgacaagttgaaaaaagagccggacgctcttaccttgctggcaccggccgccggggacaccattatctcccttgactttggaagcaatgacactgagacggatgaccagcagctggaggaggtgcctctgtacaacgacgtgatgctgccgtcaccaaacgagaagctgcagaacatcaatctcgcaatgtcccccctgcccaccgccgagactccaaaaccactccgctcgtctgccgacccggctctgaaccaagaggtggcactgaaactggaaccgaacccggagtcccttgagctttcgttcaccatgccacagatacaggatcagactccaagcccgtctgacggatcgactcgccagtcctctccggagcctaatagcccgtccgaatattgcttctacgtggacagcgacatggtgaatgaattcaaactggaactggtggaaaagctgttcgcggaggacaccgaggccaagaacccgttctccactcaggacactgacttggatctggagatgcttgcaccatacatcccgatggacgacgattttcagctgagatcctttgatcaactcagcccgctcgagagctcgtcggcgtcccccgagagcgcctcacctcaaagcaccgtgactgtctttcagcagacccagattcaagagccgaccgcgaacgcgaccactactaccgccactactgatgagttgaaaaccgtgactaaggacagaatggaggacatcaagatcctcatcgcgtcgccgtcccccacgcacatccacaaggagactacctcggccacctccagtccatacagagatacccaatcaagaactgcctcgccgaaccgcgcgggaaaaggagtgattgaacaaactgaaaagagccatccgagatccccgaacgtgctgagcgtcgcactctcgcaaaggaccaccgtgcccgaagaagagctgaatccgaagatcttggccctccagaacgcccagcgcaagagaaaaatggaacatgacggatcactgttccaggccgtcggcataggcactctcctgcagcaaccggacgatcatgcagccaccacttcactctcctggaaaagagtgaaggggtgcaagtcctcagaacaaaacggaatggaacagaaaaccatcatcctgatcccctccgatctggcctgccgccttctgggccagtcaatggatgagtctggactgccacagctcacttcatacgattgcgaagtcaacgcacccatccagggttcgaggaacttgctgcaaggagaagaactcctgcgcgccctggatcaagtcaac

SEQ ID NO: 33086 - DNA, 2478 bp, synthetic construct
  misc_feature 1..2478: note = Description of Artificial Sequence: Synthetic coding sequence
  source 1..2478: mol_type = other DNA
atggagggagccggaggcgcaaacgacaagaaaaagatttcgagtgaaagaaggaaagagaagagccgcgatgccgcccgatctcgacgctcaaaggagtctgaggtgttctatgagcttgcccaccagctgccgctgccccacaacgtctcttctcacctggataaagcctctgtgatgcgcctgactataagttatcttcgcgttaggaaactcctcgatgccggagatttggacatagaggacgatatgaaggcccaaatgaactgtttctacttaaaagccctggacggtttcgtcatggtactgaccgacgacggagacatgatatatatcagcgataacgtgaacaaatacatggggctgacccagtttgaactcacgggacacagcgtttttgattttacacacccatgtgaccatgaagagatgagagagatgctgacacatagaaatggtctcgtgaaaaagggcaaggaacaaaacactcagcgttctttcttcctgcggatgaaatgtactttgacatcacgcggaaggacaatgaatattaaaagcgccacttggaaagttctccattgtactgggcatattcatgtctacgacactaattcgaaccagccccagtgtggctacaagaagccacccatgacttgtctggttctaatctgcgagccaatccctcacccttcaaatattgaaataccgctggatagtaaaacctttctatctcgacattctttggatatgaaattcagttattgcgatgagcggataaccgagctgatggggtacgagccggaggagctgctagggcgcagtatctacgagtattatcacgcgctcgatagcgatcacctcaccaaaacccaccatgacatgtttacaaagggccaggtcacaaccggccagtataggatgttggccaagaggggcggctacgtctgggtcgagacgcaggctacggtcatctacaataccaaaaattcccagcctcagtgcatcgtgtgtgtaaactacgtcgtgtcagggataattcagcatgacttaatcttctcactgcaacagacagagtgtgtattgaagccagtcgaaagcagtgacatgaagatgacccagctttttacgaaggtggagagcgaggacacttcctccctgtttgacaagctcaaaaaggagcccgatgccttgacactactggcccccgccgccggtgataccataattagtctggattttgggtccaatgatactgaaaccgatgatcagcaattggaggaggtaccgttgtataacgacgtgatgctgccaagtcctaacgagaaactgcagaatattaatcttgcaatgtcccccctgccgaccgctgaaaccccgaaaccactaagaagcagcgcagatcccgctcttaatcaagaagtcgctttgaagcttgagcccaaccctgaatctcttgagttgagcttcaccatgccgcagatacaggatcaaacaccctctccctcagatggctcaacccggcaatcttctccagaaccgaatagcccatctgagtattgtttttatgtcgactcagatatggtaaacgaattcaaactggaattggttgagaaattgtttgccgaagacacagaggctaaaaatcccttctcaacacaggataccgacttggatctggagatgctggctccctacattcctatggacgatgactttcaactcagatctttcgaccagctgtcccccctggagtcaagctcggccagtcctgaatcggcgtctccccagagtaccgtaaccgtgtttcagcaaacacagatccaggagcctacggcaaatgcaacaacgacgaccgctacaaccgatgagctgaagacggtgactaaagacaggatggaagacatcaagatactaatcgctagcccttctccaacacacattcacaaggagaccacaagcgccacaagttccccttatagggatacacagtccaggaccgccagcccaaatagggctggaaagggggtgatcgaacagaccgagaagagccaccctcgcagtcctaatgtactatccgtggcgctctctcaacgaaccaccgtaccagaagaagagctgaatccgaaaatacttgctctccagaatgcccagcggaagcgcaagatggagcacgacggaagcctttttcaggccgttggcattgggactctgctgcagcaaccagatgaccatgccgccactacttctctaagttggaaacgcgttaaggggtgcaagtcgagcgaacagaacggaatggaacaaaagactatcatcctcatcccttctgacttggcctgtcgcctcctgggacaaagcatggatgagagcggtctaccccaattgacttcctacgactgtgaggtgaacgcacccattcagggtagccgcaatttgctgcaaggtgaggagctgctcagggcgctggaccaagtgaac

SEQ ID NO: 33087 - DNA, 2478 bp, synthetic construct
  misc_feature 1..2478: note = Description of Artificial Sequence: Synthetic coding sequence
  source 1..2478: mol_type = other DNA
atggagggtgccggaggcgccaacgacaagaagaagatcagctccgagagacggaaggagaagtcgcgcgacgccgcccggtcaaggcgctctaaagaatcggaagtcttttacgaactcgctcaccagcttccgctcccccataatgtgtccagccatctggacaaggcctccgtgatgcggctgactatttcataccttagggtgagaaaattgctcgatgccggggacctggacatcgaagatgacatgaaggctcagatgaattgcttctacctcaaggccctggatggattcgtcatggtgctcactgacgacggggacatgatctacatcagcgacaatgtcaataagtacatgggattgacccagttcgaattgaccggccattcagtgttcgacttcactcatccgtgtgatcacgaagagatgagagagatgctgactcatcggaatggacttgtcaagaagggcaaagaacaaaacacccaacggtccttcttcctgcgcatgaaatgcactctgacctcaaggggccggacgatgaacatcaagtccgcgacttggaaggtgctgcactgcaccggacatatccatgtctacgatactaactccaaccagccccaatgcggctacaagaagccgccaatgacttgcctggtgctgatttgtgaaccaattccgcatccgagcaatatcgagatcccactcgactcgaaaactttcttgtcccgacactcgctggatatgaagttttcatactgcgatgagcgcatcactgaactgatgggatacgagccggaagaactcttgggccgcagcatctacgaatactaccacgctctggactcggaccatctgaccaagacccaccacgacatgttcaccaaaggacaggtcactactggacagtaccggatgctggcgaaacggggcggatacgtgtgggtggaaacccaggccaccgtgatctacaatactaagaattcccagccgcaatgcatcgtgtgcgtgaactacgtggtgtcagggatcatccagcacgacctgatcttcagcctccagcaaacggaatgcgtgctgaagcccgtcgaaagctccgacatgaagatgacccagcttttcactaaggtcgagtcggaggacacctcgtcgctcttcgacaagctcaagaaagaaccggacgcgctcacccttcttgcgccagcggccggagacaccattatctccctcgacttcggatcgaatgacactgaaacggatgatcaacagctcgaagaagtgcctctttacaatgatgtgatgctgccgtcacccaacgagaagttgcaaaacatcaatttggccatgagcccgctgccgactgctgagacgcctaagccactgagatcctcggcagatccggcgctcaaccaggaggtcgctttgaaactcgaaccgaaccccgaatccctggaactcagcttcaccatgcctcagatacaagaccagacgccatcgccatcggatggttcgacccgccaaagctccccggagccgaactcgccgtcggagtactgcttctacgtggactcggacatggtgaatgagttcaagctggaactcgtggagaagctgtttgctgaagataccgaggccaagaacccgttctcaacgcaggataccgatctcgacctcgaaatgctggcgccctacatccctatggacgacgacttccaactccggagcttcgaccaactgtctccactggagtcatcttccgcgagcccggaaagcgccagcccacagtcgaccgtgacggtgttccagcagactcaaatccaagaacccaccgccaacgccactacgactaccgccactaccgacgaactgaaaactgtcactaaggacaggatggaggacatcaagatcctgatcgcatctccttcgcctacccatatccacaaggagactacttccgccacttccagcccgtatagggacactcagtcgcggaccgcctcgccgaatcgcgccgggaaaggagttattgaacagactgagaagtcccatccaagatccccaaacgtgctgagcgtggcgctgtcccaaagaaccactgtcccggaagaggaactgaaccctaagatccttgctctgcagaacgcacagcgaaaaagaaaaatggagcacgatggatcactgtttcaggctgtggggatcggaactcttcttcagcagccagatgaccacgcagcaaccacctcgctgtcgtggaaaagagtcaaggggtgtaagtcctccgaacagaacggaatggagcagaaaaccatcattctgattccaagcgatttggcatgccggcttctgggacagtcaatggacgagtcggggctccctcagcttaccagctacgactgcgaggttaacgcgccgattcagggatctcgcaatcttctccaaggtgaggagctgctgcgggccctcgaccaagtgaac

SEQ ID NO: 33088 - DNA, 2478 bp, synthetic construct
  misc_feature 1..2478: note = Description of Artificial Sequence: Synthetic coding sequence
  source 1..2478: mol_type = other DNA
atggaaggtgccggcggagccaacgacaagaagaagatatcgtcggagagaagaaaggagaaatcgcgggacgcagcaagatctcgaaggtccaaggaatcggaagtgttttacgaattggcccaccagcttccactgccacataatgtatcctcccatttggataaagctagcgtgatgaggctgactatatcctacctgcgggtccgaaaactgctggacgctggcgacctggacatagaagatgacatgaaggcacaaatgaactgtttttacctgaaagcgctggatgggtttgtcatggtgctgactgatgatggagatatgatttacatcagcgacaatgtgaacaaatacatgggacttacccaatttgagctgaccggacattcagtgtttgatttcacccatccttgtgatcacgaagaaatgagggaaatgctcactcaccgaaacggacttgttaagaaaggcaaggagcaaaatacccagcgttcattctttctccgtatgaagtgtacgttgactagcagaggacgtactatgaacattaagtcggcgacctggaaggtgctgcattgcacgggacacatccacgtgtacgacaccaacagcaaccagcctcagtgtggttacaagaagccgccaatgacctgcctggtgctgatctgtgaacccatcccacatccttctaatatcgaaatcccattggactccaaaaccttcctgtcacgccactcgcttgatatgaagttttcttactgtgatgaaaggatcactgaacttatgggttacgagcccgaagaactgcttgggcgctcaatttacgagtactaccatgcacttgatagcgaccatctgactaaaacccaccatgatatgtttaccaagggacaagtgaccaccgggcagtatcggatgctcgccaagagaggtggatacgtgtgggtcgaaactcaggcaactgtgatttacaatactaagaattcgcaacctcagtgcatagtgtgtgtcaattacgttgttagcggcattatacaacatgacctgattttctcactgcagcaaaccgagtgtgtcctgaaaccagtggaatcgagcgacatgaagatgactcaactctttaccaaagtggaatccgaggacactagctcccttttcgataagctgaagaaggagccggatgcacttacgcttctcgctcccgcggccggagacaccatcataagccttgattttggtagcaatgataccgaaaccgatgatcaacagctggaggaagtgcctttgtataacgacgttatgcttccttcccctaacgaaaagctgcagaacatcaaccttgcgatgtcgcctctgccaactgcagaaactccgaagcctcttaggtcgtctgcagatcctgcactcaaccaagaagtggctctgaaactcgaaccaaaccctgaatcccttgaacttagcttcaccatgccacaaattcaggatcagaccccttcgccttcagacggatcgaccagacaaagctcgcctgaacctaatagcccaagcgagtactgtttttacgtggattcagacatggtgaacgagtttaagctggagttggtggagaagctgttcgctgaagataccgaagccaagaatcctttttccactcaggacactgatcttgaccttgaaatgcttgcaccttacattccaatggatgatgattttcagctgcggtcgttcgaccaactgagccctctcgaatccagctcggctagccccgaatcggcaagccctcagtccacggtgactgtgtttcaacagacccagattcaggaaccgaccgcaaacgcaactacgaccactgcaaccactgatgagctcaagaccgtgaccaaggataggatggaagatatcaagattcttatagctagcccgtcgcctacccatatccataaggaaaccacttcggcaacgtcatccccataccgagatactcaatcccgaacggcctcgccaaaccgcgcaggaaagggggtgatcgagcagactgaaaagagccaccctagatcaccaaatgtgctttcggttgccctgagtcagagaaccaccgttcctgaggaagaactgaatcccaaaattctcgccctccagaacgcacaaaggaaaagaaagatggaacacgatggtagccttttccaggcagttggcattggaaccttgctgcaacaaccagatgaccatgctgccaccacctcgctgtcgtggaaacgggtcaagggatgcaagtcaagcgaacaaaacggaatggagcaaaagactatcattctcatcccttcagatcttgcatgcagacttcttgggcaatcaatggatgagtcgggccttcctcaacttactagctacgattgcgaagtgaacgctcccattcagggatctcgaaaccttctccaaggcgaggaactgctccgggccctcgaccaagtgaac

SEQ ID NO: 33089 - DNA, 2478 bp, synthetic construct
  misc_feature 1..2478: note = Description of Artificial Sequence: Synthetic coding sequence
  source 1..2478: mol_type = other DNA
atggaaggcgcaggaggtgctaacgataagaaaaagatttcttcagaacgtcgaaaagagaaaagtcgtgacgcagcgcgttcacggcgtagtaaggaatccgaagtgttctacgagctagctcatcagctaccgcttccccacaacgtgtcttcacatttggataaagcgtctgtcatgagactgaccatatcatacttaagagtccggaagttgcttgatgctggggatttggatatcgaagacgacatgaaagcacagatgaattgtttctatttgaaagcacttgatggattcgtgatggtgcttaccgatgatggtgacatgatctatatttctgataatgtaaataaatatatgggattgacgcaattcgaattaacaggccactctgtgttcgatttcacacacccttgcgatcacgaggaaatgagggaaatgttgacacaccgaaacggtttagttaaaaaaggcaaggaacaaaatacacagagatctttttttcttcgtatgaaatgcacactaacgtcccgcggaagaacaatgaatattaaatctgctacatggaaagttctacactgcacgggtcacattcatgtctacgatactaactctaatcagccgcaatgcggttataagaagccgccgatgacttgcttggtgttaatttgcgagcctattccacatccgtccaatatcgagattccattggattccaaaactttcttgtctcgacacagcttggatatgaaattcagttactgcgatgaacgaattaccgagcttatgggctacgaacctgaggaacttttgggcagatctatctatgaatattatcatgcacttgatagcgatcacttgactaagacccatcatgatatgtttacgaagggacaagtcactactggtcaatatagaatgctggcgaaacgtggaggttatgtctgggttgaaactcaggccactgtgatctacaacacaaagaactctcagccacaatgtattgtttgcgttaactatgttgtatccgggattattcagcacgatcttattttcagtctacaacaaaccgagtgcgtcttgaagccagttgaatcaagtgatatgaaaatgactcagctttttacgaaagttgaaagtgaagacacgtcgtcgctctttgacaaactgaagaaagaaccagatgctctaacattgctcgcaccagcagctggtgacactattatttcactcgattttggatccaacgataccgagaccgatgatcaacagcttgaagaggtgccgctctacaacgacgtcatgttacccagcccaaatgagaaactccaaaacattaatctcgctatgtcccctctacctacagctgaaactccgaaaccactcaggtcaagtgctgatccagctttgaaccaagaggtcgccctcaaactggaacccaatccagagtcgctcgaattgtcttttacaatgccacaaatacaagaccaaaccccatcaccctcagacgggtcaacacgacagtcgtctccagaaccaaatagtccatcagaatactgtttctatgttgatagtgatatggtcaatgaattcaagcttgagttggttgagaagttgttcgctgaggatacagaagcaaaaaaccctttcagtactcaggacacggacctggacttggaaatgctggcgccatacatcccgatggacgatgacttccaattacggagtttcgatcagctgagcccattagagtcatcctctgcatctcctgaaagcgcttctcctcagtcaacggttacggtgttccaacaaacccagattcaagaaccgacagctaatgctacaactactacggccaccacagatgaactgaaaacagttacaaaagatcggatggaggatattaagatcttgattgcatcgccctcacccacccatatacataaagaaactacgagtgccacaagctctccttatcgggatacacaatcccgaactgcatcaccaaatagagctggcaagggagttatagagcaaacggaaaaaagccacccaagatcgccaaatgtcctgtccgtagctctttctcaaagaactacagttccagaggaagaattaaatccgaagatcctggcacttcaaaacgcgcaaagaaaaagaaaaatggaacatgacgggtcactgttccaggctgttggcattgggacacttcttcaacaacctgatgaccatgctgccacaactagcctctcatggaaacgtgttaagggatgtaaaagctcagaacaaaatggaatggagcagaaaacgattatattgattccatcagacttggcttgcagattgttggggcaatctatggatgaatcaggactcccacaactcacctcctacgactgcgaagttaacgctccaattcagggatcaagaaacttgttgcaaggagaggaattgttgagggcgttggaccaagttaac

SEQ ID NO: 33090 - DNA, 2478 bp, synthetic construct
  misc_feature 1..2478: note = Description of Artificial Sequence: Synthetic coding sequence
  source 1..2478: mol_type = other DNA
atggagggggccgggggggcgaatgataaaaagaagatttcctccgagaggcggaaggagaaatctcgagatgccgctcgctcccgcagaagtaaagaaagcgaagtcttctatgagctcgctcaccagttgcccttgccgcacaacgtcagctcccatttagacaaggcctccgtgatgcgtctgaccatctcttatctgagagtgagaaagcttctggatgccggtgacctcgacatcgaggatgacatgaaagcacaaatgaattgtttctacttgaaggccctcgacggattcgtgatggtgctgactgatgacggcgacatgatttatatctctgacaatgtgaacaagtatatggggcttacacaattcgaacttaccggccatagtgtctttgatttcacgcacccgtgtgaccacgaggagatgagagagatgttgactcaccgcaatgggctggtgaagaagggtaaggaacagaatacacagcgaagcttctttctgcgaatgaaatgcacactgacttcaaggggccgaaccatgaacattaagtctgcgacatggaaagtcttgcactgtacgggccacatccacgtctatgatacgaattctaaccagccacagtgcggctataagaagccgccgatgacttgcctcgtgctgatttgcgaacccattccacaccctagcaacatcgaaattcccctggattctaagacttttctctcacggcattctctcgatatgaaattctcatactgtgacgaaaggataacagagctaatgggatacgagcccgaagagcttctcggtcggtcaatttatgagtattatcatgctctcgactcagatcatcttactaagacccatcacgacatgtttaccaaaggacaagtcactacgggccagtataggatgctcgctaagcgcgggggctatgtttgggtggaaacacaagccactgtgatctataacaccaaaaatagccagccccagtgtatcgtgtgtgtgaactacgttgtatccggcatcattcagcatgacctgatcttcagcctacagcagacagagtgtgtcctgaaacctgtagagtcgagtgatatgaagatgacacagctatttaccaaggtcgaaagcgaggatacttcatctctgtttgacaagctgaagaaggagccagatgcacttacgctgctggcccctgccgcgggcgatactattatctcactggattttgggtccaatgatactgaaacagatgaccagcaacttgaagaagtccctctgtacaacgacgtcatgcttccaagcccgaacgaaaagctccagaacattaacctcgccatgtctccccttccaaccgccgaaacgcctaaacctctccgatcttctgctgatcccgcccttaaccaggaggtcgctctgaaactggagccaaaccctgagagtctcgaactgtcttttaccatgccgcaaatacaagatcaaacaccttccccctctgacggtagcacaaggcagtcttccccggagcctaattcaccttctgaatattgcttctatgtggactctgatatggtgaacgaattcaaacttgagctcgttgagaagctgtttgcagaagatactgaggctaagaatcccttctccacacaggatacagacttggacctcgagatgctggcaccatacatccctatggacgatgacttccagctccgctcttttgatcagctcagcccactcgaatcttcatccgcgtctccagaatcagccagccctcagtcaactgtaacagtctttcagcagacccagatccaggagccaacagcaaatgcaacgactaccacagcaactactgacgagttaaaaaccgtgacaaaagatagaatggaggatattaagatcctcatcgcatctccatctcccacccacatccacaaggagaccacctccgccacaagctccccttatcgcgacacccagtctcggaccgcaagccccaaccgagctggaaagggcgtgatagaacagactgaaaaaagccacccaagatccccaaacgtcctgagcgtcgctctcagtcagaggacaacagtgccagaagaagaactcaacccaaagattctggccctgcaaaatgcccagcgcaaacggaagatggagcatgatggatcattattccaggctgtgggaattggcactctgttgcagcagcccgatgaccatgctgccaccacctctctgagctggaagcgggtaaagggctgtaagtcctctgagcagaacggcatggagcaaaagaccatcatccttatcccttctgatcttgcatgccggctcctgggccaatccatggatgagtccggcctaccccagctcacctcttatgactgtgaggtgaacgcaccgatccagggtagtcggaacctcctgcaaggagaggagctgctcagagccctggaccaagtgaat

SEQ ID NO: 33091 - DNA, 2478 bp, synthetic construct
  misc_feature 1..2478: note = Description of Artificial Sequence: Synthetic coding sequence
  source 1..2478: mol_type = other DNA
atggaaggcgctgggggcgccaacgataagaagaagatctcaagtgagcgccgtaaagagaagagcagggacgcagcccggtcaaggcggagcaaagagtccgaagtgttttatgagctggcccatcagcttcctctgccccacaatgtgtcatcacatctggacaaagcaagcgtcatgcggttaactatctcctatcttcgggtgcgcaagcttttagatgcgggcgatctggatatcgaggatgacatgaaagcccaaatgaattgcttctatctcaaggccttagacgggtttgtgatggtactgactgatgacggcgatatgatctacataagcgataatgtcaacaaatatatgggcttaactcagtttgagctgactggccattctgtgttcgacttcacccatccgtgtgaccacgaagaaatgagggagatgttgacgcacagaaacggccttgtgaagaaaggcaaggagcaaaacactcaacgttccttctttctccggatgaaatgcactttaacttcaagaggtcgaacgatgaatattaaatccgcaacctggaaggtactccattgcactggacacatccatgtctatgacaccaacagtaatcaaccgcagtgtgggtacaagaagccccccatgacctgcttagttctgatttgcgaacccattccacatcctagtaacatagaaatcccattggacagcaagacttttcttagccgccacagtctggacatgaaatttagctattgcgatgagagaattacagagctgatgggatacgagcccgaggaattactgggcaggtccatatatgaatactatcacgccctggactctgaccacctgactaaaacgcaccatgacatgttcacaaagggccaagtaacaaccggccagtatcgcatgctggcgaaacgcggcggttatgtttgggtggagactcaggccacggtgatatataatactaagaactcccagccccagtgcatagtgtgcgttaactatgtggtgtctggcattatacaacatgacctgatcttctcactgcagcagacggagtgtgtattgaaacccgttgaaagctcagacatgaaaatgactcagctgtttaccaaagtggaatcagaggacactagctctctgttcgacaagctcaagaaagaacctgacgccctgacgcttctggctcctgccgctggagatacaatcatctctttagattttggtagtaacgataccgaaacagacgaccagcagctcgaagaggtaccactgtataatgatgtcatgttgccttcccccaacgaaaaactgcaaaatattaacctagcgatgagcccattgccaaccgctgaaacccccaaacctttacggtcttccgccgatcctgcactcaatcaggaggttgcgctgaagctcgaacccaatcccgagtccctcgagctgagctttaccatgccgcagattcaggatcagacaccaagtccttctgacgggtcaacccgtcagtcgtcaccggagccaaattcaccttcggagtattgtttttacgtggactcggatatggtcaatgagttcaagttggaactggtggagaagttgttcgctgaggatacagaagcaaagaatcccttttcgactcaggataccgatcttgatctggagatgttagctccatatattccgatggatgatgacttccaattgcgctcatttgatcaactgtctccactggagtcctcctctgcttcccctgagtccgcatcccctcaatctactgtcaccgtatttcagcagacacagattcaagagccaacggctaacgctactactacaacagctacaacagacgaattgaagaccgtgaccaaggaccgaatggaggacattaagattctcatcgcatcccccagccccacacatatccacaaggagacaacatccgctacatcatctccatatcgggatacacagtctcgcaccgcatcacctaatagagccggcaagggggtgattgaacaaaccgagaagagccatccgcgaagtccgaacgtgctcagtgtagctctttctcagaggaccacagtgcccgaggaagaactgaatcccaaaattttggccctccaaaatgcacagcgtaagcgcaagatggaacacgacggatctcttttccaggccgttggcataggcaccctgctgcagcagcccgacgaccatgctgccaccacttctctaagttggaagagggttaagggatgcaagagcagtgagcagaacggcatggagcaaaagacgataatcttaataccatcagatttagcctgccgccttcttggccagtctatggacgaatctggactgccccagctgacctcctacgattgtgaggtgaatgctcctatccagggcagcaggaacctgctgcagggcgaagagctcctgagggcccttgaccaggtgaat

SEQ ID NO: 33092 - DNA, 2478 bp, synthetic construct
  misc_feature 1..2478: note = Description of Artificial Sequence: Synthetic coding sequence
  source 1..2478: mol_type = other DNA
atggaaggagcaggaggagcgaatgataagaagaagatttccagcgagcgtaggaaggaaaagtcccgtgacgcagcacgctcccgtcgttccaaggagtcggaggtgttctacgagcttgcgcatcaactcccccttccacataatgtgtccagccatctggataaggctagcgtcatgcggctcactatctcgtaccttagggtgaggaagctgctggatgcgggtgacctggatatagaagatgatatgaaggcccagatgaattgtttctacctcaaggcccttgacggtttcgtgatggtgctcactgatgatggtgatatgatctatatcagtgataatgtcaacaagtacatgggcctgacccagtttgagcttaccggccactccgtgtttgattttacccatccatgtgaccacgaagagatgcgggagatgcttacccatagaaacgggctggtcaaaaagggcaaggagcagaacacccagcggagcttttttctgaggatgaagtgcaccctgaccagccgaggtcggactatgaacattaagtcggcaacttggaaggtgcttcattgtactgggcatattcacgtgtacgacaccaactccaatcagccacaatgcggatacaagaagccaccaatgacgtgcctggtgcttatttgtgaacctattccgcatccgtcaaatatcgaaatccctttggatagcaagacttttctctcgcgccattcccttgacatgaagttctcgtactgtgatgaacgtattaccgaactgatgggatacgaacctgaagaactgttgggacggtccatatacgaatactaccacgctctggactcggatcatctgaccaagacccaccatgatatgtttaccaagggtcaggtcaccacggggcaataccgcatgctggcaaagagaggtggctacgtctgggtggaaactcaggccacggtgatttacaacactaagaactcacagccacagtgtatcgtttgtgtcaactacgtggtgtcagggattatacagcatgatctgatcttttccttgcagcagactgaatgtgtccttaagcctgtggaatcgagcgacatgaaaatgactcaactctttactaaagtcgaatcggaggacacgagcagcctctttgataagctgaagaaagaacctgatgccctcactctgctcgcaccagccgcaggggacactatcatttcgctggacttcggctccaacgacaccgaaaccgacgatcaacagctggaggaagtccccctctacaatgatgtgatgcttccatcgcctaatgaaaagctccaaaacatcaacctggccatgtcgcctcttcctactgcagaaactccgaagcctctgcgatcatcggcagatccagcactgaatcaggaggtggcccttaaactcgagcctaaccctgagtcactcgagctctcctttactatgcctcaaatacaggatcagaccccctctccatccgatgggagcactagacagtcgtcccctgaaccaaacagcccttcggaatattgcttttacgtggattcagatatggtcaacgagttcaagctggagctcgtggaaaagctgtttgcagaggacactgaagcaaagaaccccttttcgactcaggatactgatcttgatcttgagatgttggcaccatacattccgatggacgatgatttccagttgaggagctttgaccagctttcgccccttgagtcatcgtccgcatcgcctgagagcgcctcgcctcaatccacggtcaccgtctttcagcaaactcaaattcaggaaccaacggccaacgcaactactaccaccgcaaccacggacgaactgaaaaccgtgactaaagatcgcatggaagatatcaagattctcatagcatcaccatcgccaactcacattcacaaagaaactacctccgcgacgtcatccccctatagagatacgcaatcccgcactgcgtcacctaaccgtgcaggaaaaggagtcatcgaacagactgaaaagtcacatcctaggtcgcctaacgttcttagcgtcgccctgtcacaaagaaccaccgtgcccgaagaggagctcaaccccaagatcctcgctctgcaaaacgcacagagaaagcggaaaatggaacacgatggatcgctgtttcaagcagtgggaattggtactctgcttcaacagcctgacgatcacgcagcaaccacgtccctttcttggaagcgtgtgaagggctgcaagtcctcggagcaaaacggaatggaacaaaagacgattattctgattccctccgatctggcatgcagactgctggggcaatccatggacgaatcgggactgccacaactgacgtcctacgattgtgaggtgaatgctccaatccaaggatcacgcaatctccttcagggtgaagagcttctgagagcgcttgatcaggtcaac

SEQ ID NO: 33093 - DNA, 2478 bp, synthetic construct
  misc_feature 1..2478: note = Description of Artificial Sequence: Synthetic coding sequence
  source 1..2478: mol_type = other DNA
atggaaggcgcaggtggagctaacgataagaaaaagatcagctccgagagaagaaaggaaaagagccgggatgccgcccggagccgccggagcaaggaatccgaggtgttctacgaactggctcatcaattgcctctgcctcacaacgtgtcctctcaccttgataaggcttcggtgatgagactgactatctcctacctgagagtcagaaagctccttgacgctggtgatctggatatcgaagatgacatgaaagcccagatgaactgtttctacctcaaggccctcgacgggttcgtaatggtgttgaccgatgacggagacatgatctacatcagcgacaacgtgaacaagtacatgggcctcactcagtttgaactgaccggccactcggtgttcgacttcactcatccatgtgatcatgaagagatgagagaaatgctgactcatcgtaatggcctcgtgaaaaaggggaaggagcagaacactcagcggtcgtttttcctgcgcatgaaatgcactcttacctcgagagggcggaccatgaacattaagtcggccacttggaaggtgctccactgcactgggcacatccatgtgtatgacactaactcaaatcagccgcagtgcgggtacaaaaagccgccaatgacctgtctggtcctcatctgcgagccaatcccgcaccctagcaacatcgagatcccattggactcgaaaacttttctgtcccgccactcactggacatgaagttctcgtattgcgatgaacggattactgaacttatgggatacgagcctgaggagctcctgggaagatcgatctacgaatactaccacgccctggatagcgaccacctcactaagacccaccatgacatgttcaccaagggccaagtgactaccggacaatacaggatgcttgcgaagcgcggaggatacgtctgggtcgaaactcaggccactgtgatatacaataccaagaactcgcaaccccaatgcatagtctgcgtgaactacgtggtttcagggatcattcagcacgatctgatcttctccctccagcagaccgaatgcgtccttaagcccgttgaatcgtcggacatgaagatgacccaactgttcactaaggtcgagtcggaggacacctccagccttttcgataaacttaagaaagaaccagatgctctcactcttttggcaccggctgccggggatactatcatcagcctcgacttcggaagcaatgataccgagactgatgatcagcagcttgaagaagtgccactgtacaacgatgtgatgttgccctcaccaaatgagaaactgcagaatatcaatctggccatgtctccactccctactgctgagactcctaagccgctgcgctcaagcgccgatcctgccctcaatcaggaggtcgcccttaagctcgaaccgaacccggaaagcctcgagctgtccttcaccatgccacagatccaagaccagaccccgtccccgtctgacggatccactcgccagtcatcgccggagccaaattcgccttcggagtattgtttctacgtggactccgatatggtcaacgagttcaaacttgagctggtggagaagctgttcgcggaagataccgaagctaagaatccctttagcacccaggacaccgacctggacctggaaatgctcgcaccgtacatcccaatggatgatgattttcaactccggagcttcgatcaattgtcaccgctggaatcttcatccgcctcgcccgaatccgcgtcacctcagtccaccgtcacggtgttccaacaaacccaaatccaagaaccgactgcgaatgccactaccaccaccgcgactaccgatgaacttaagaccgtgactaaggacagaatggaagatatcaaaatcctgatcgcctcgccatcacccacccacatccacaaagagactacttccgccacttcatcgccctaccgggatacccagtcaaggacggcgtcaccgaacagagccggcaagggagtgatcgagcaaaccgaaaaatcccatccccggtcgcccaatgtgctgtcggtggctctgtcgcaaaggaccaccgttccagaggaggaactcaacccgaagatcctggcacttcagaatgcgcaacggaaacgcaagatggaacatgacggttccctgtttcaggcggtcggcattggcacgctcctgcagcagccggacgaccatgcagcgaccaccagcctctcctggaagcgggtgaagggatgcaagtcaagcgaacagaatggaatggaacagaaaaccatcatcctcattccgagcgacttggcctgccggctgctgggccaatcaatggacgagtccggcctgccacaattgacttcgtacgactgtgaagtgaacgcaccaatccagggcagccgcaacctcctccagggggaagagctgctgcgggcattggaccaggtgaat

SEQ ID NO: 33094 - DNA, 2478 bp, synthetic construct
  misc_feature 1..2478: note = Description of Artificial Sequence: Synthetic coding sequence
  source 1..2478: mol_type = other DNA
atggaaggagctggaggagcaaacgacaaaaagaagatttcctccgagcggagaaaagagaagagcagagatgcggcacgtagccggcggtccaaagaatctgaagtcttttacgaattggcgcatcaactcccattgccgcataatgtgtcaagccacctggataaggcatcggtcatgcgtcttactatctcttaccttcgggtcaggaaacttctcgatgcaggagatctcgacatcgaagatgacatgaaggctcagatgaactgcttctacctgaaggcactcgacggatttgtgatggttttgacggatgatggtgacatgatctacatcagcgataacgtcaacaagtacatgggccttactcagtttgaactgaccggccatagcgtctttgattttacccacccatgtgaccatgaagaaatgcgggagatgctgacgcaccggaatggactggtgaagaagggtaaggagcaaaacactcagaggtcctttttcctgagaatgaagtgcaccctgacctcgagaggtcggactatgaacattaagtccgcaacctggaaggtccttcattgtaccggtcatatccacgtgtacgacactaactccaatcaacctcagtgtggttacaagaagcccccaatgacttgccttgtgctgatttgtgagccaattccccatccctcaaacattgagatcccattggacagcaagacttttctgtcccgtcactctctggacatgaagttttcctactgcgacgagcgaattactgagcttatgggatatgagcctgaagaacttcttgggagatcaatttacgaatactaccacgctctcgattcggaccatctgaccaagactcatcacgatatgtttactaagggacaggtcaccaccggtcagtaccgtatgttggcaaaacgaggaggttacgtatgggtggaaacgcaagcaaccgtgatttacaacaccaaaaactcccaacctcaatgcatagtctgtgtcaattatgtggtgtccggcatcatccagcacgatcttatcttcagcctccagcagaccgagtgcgtgctcaagccagtggaaagcagcgacatgaagatgactcagctttttactaaggtggaatcggaggacacttcgtcgctgtttgataagctgaagaaagaaccggatgctctgactctgcttgccccagcagcaggtgacaccatcatttcgctcgactttggctcgaatgataccgaaactgatgatcagcagctggaagaagtgcccctttacaacgacgtgatgctgccctcccctaacgaaaaacttcagaacattaacctggcgatgtccccactgccaaccgctgaaacccctaagcctttgagatcgtcggcagatccggccctgaatcaagaagtcgcgctcaaactcgaaccaaatccggaatccctcgagctgtcgttcactatgcctcagatacaggaccagactccttcaccatccgatggatccaccagacaatcctcaccagaacccaactcgcctagcgaatactgtttttacgtggattcagatatggtcaacgaattcaaattggaactggtggaaaagctgtttgcggaggataccgaagcaaagaatccattcagcacgcaagatactgatcttgacttggagatgctggcgccctacattcctatggacgacgattttcaactgcggagctttgatcaactttcccctcttgaatcgtcgagcgcatcgcctgaatccgcatcgcctcagtcaactgtcaccgtgttccaacagacccaaattcaagaacctactgcgaacgcaaccaccaccacggctactactgatgagctgaaaactgtgactaaggacagaatggaggacattaagattcttattgccagtccttccccaacgcatattcataaggaaactacttcagcaacttcgtcgccttaccgcgatacccaatcacggaccgcgagcccaaatcgcgccggtaagggtgtgatcgaacaaaccgagaaatcgcatcctcgttcgccaaatgtgctgtccgtcgcactgtcgcagagaaccactgtgcccgaggaagaactgaacccaaagatcctggcattgcaaaacgcccaaaggaagagaaaaatggaacatgatggctcactttttcaggctgtgggtattggcacgctcttgcaacaacctgacgatcacgcggcaaccacgtcactctcgtggaagcgtgttaaagggtgcaagagctccgaacagaacggcatggagcaaaagaccattattctcattccgtctgatctggcttgtcggcttctgggtcaaagcatggacgaatcgggcctgccacaactgacctcatatgattgtgaagtgaatgctccaatacaaggctcacggaacctgctgcaaggtgaggaacttcttcgcgcccttgatcaggtgaac

SEQ ID NO: 33095 - DNA, 2478 bp, synthetic construct
  misc_feature 1..2478: note = Description of Artificial Sequence: Synthetic coding sequence
  source 1..2478: mol_type = other DNA
atggaaggcgctgggggcgcaaacgataaaaagaagatttcttcagagcgccgaaaagagaagtcccgggatgcagcacggtctagacgctcgaaggagtctgaagttttttacgagctcgcccatcagctgcctctgccacacaacgtgtccagccaccttgataaggcctctgttatgcggttaacaatctcatatctgagggtccgaaaactgctcgatgcaggggaccttgacatagaagacgatatgaaggcgcagatgaattgtttttatctcaaagctctggacggatttgtgatggttctgactgacgacggagacatgatctatataagtgataatgtcaacaaatacatggggttgactcagttcgagctgacgggccactctgtattcgacttcacccacccctgcgatcatgaggagatgagagagatgctcacacacagaaatggactggtgaaaaagggcaaggagcagaatacccagcgctctttctttctgagaatgaaatgtactcttacctcgcgcgggagaacaatgaacatcaagtcagctacttggaaagtgctacactgcaccggccatattcacgtgtacgacacaaactctaaccaaccccagtgtggttacaagaaaccccccatgacttgtctggtcctgatatgcgagcccatccctcatccaagtaacatcgagatcccattggactctaagaccttcttgtctagacactcactcgatatgaagttctcctattgtgatgaacgaatcacagaactcatgggatatgagccggaagagctgttagggaggtccatttacgagtattaccatgccctggattccgaccaccttaccaagacacatcacgatatgttcaccaaggggcaggtgaccacaggccaatacagaatgctggcgaaacgaggcgggtacgtttgggttgaaacccaagccacagttatctataacaccaagaactctcagcctcagtgcatcgtgtgcgttaattatgtcgtgtccgggatcatacagcacgatctgatttttagtctgcagcagaccgaatgtgttctgaaaccggtggagagctccgatatgaagatgactcaactattcaccaaggttgagagcgaagatacttcatccctgtttgacaagttgaagaaagagcccgacgcgttgaccctgctggctcccgccgcaggcgatacaatcatctcattggactttggctccaacgacacagaaacagatgaccagcagctggaagaagtgcctttgtacaatgatgtcatgctgccatcacctaacgagaagctgcagaacattaaccttgctatgagtccactgcctactgctgagactcctaagccgctgcgctctagcgctgaccccgccctcaatcaagaggtggctctgaagctcgaaccaaatccagaaagcttggagctgtcttttacgatgccccaaatccaggatcagacccctagccccagcgacggcagcactcggcagagcagtcccgagcctaacagcccctccgagtactgcttttacgttgatagcgacatggtgaacgaatttaaactggagctggttgagaagctcttcgcagaagacacggaagcgaaaaaccctttctcaacccaagacactgacctggatctggagatgcttgccccttacatcccaatggacgacgactttcagctacggtcctttgatcagctgtctccacttgagagttccagcgctagtccagaatcagcctcaccccaatcaacagtgactgtgttccagcagacccagatccaggaacctacggccaatgcaaccactaccactgcaaccacagatgaactcaagaccgtgacaaaggatagaatggaagacattaagattctcattgcctccccatcgcccacgcacatacataaagagacaacgtcggcaacgtctagtccctaccgtgatactcaatctcgcactgcctctccaaaccgcgcagggaagggggtgatcgaacagactgagaaatctcacccacgctcgcctaatgttctgagcgtagccctgagtcagaggaccaccgtgcctgaggaggaattaaatcctaaaatccttgctctccagaacgctcagaggaaacgaaaaatggaacatgatggctccttgttccaggctgtcggaataggaactcttcttcagcagccagacgaccacgccgctaccacttctctatcctggaagcgggtcaagggctgtaagtcgtccgagcagaatgggatggaacagaagaccatcatcctcatcccatctgaccttgcctgccgattgcttggtcagtccatggatgagtccggtcttcctcagctgacaagctacgactgtgaggtcaatgccccaatccagggctcacgtaacctcctgcagggagaagagctactcagagcacttgaccaggtcaac

SEQ ID NO: 33096 - DNA, 2478 bp, synthetic construct
  misc_feature 1..2478: note = Description of Artificial Sequence: Synthetic coding sequence
  source 1..2478: mol_type = other DNA
atggaaggagcgggaggggcaaacgataaaaagaagatatcatcggagcggcgaaaggaaaagtcccgtgatgcagcacgatctcgccgctctaaggagagtgaagttttctacgaactcgcacatcagctgccgctgccgcacaatgtatcctcccacctggataaagccagcgtcatgagactcacaattagttacctgagagtccggaaactgcttgatgcgggggacctggacatcgaagacgatatgaaggcccagatgaattgcttttacctaaaagccttggatggcttcgtgatggtactgacagatgatggtgatatgatctacatcagcgataatgtgaacaaatacatgggcctcacgcagtttgaattgactggccacagtgtgtttgacttcacccatccttgtgaccacgaggaaatgcgagagatgctcacacatagaaatggactggtcaagaaaggaaaggagcagaacacccagcgctctttctttctgcgcatgaagtgcaccctgacaagtaggggccgcaccatgaatattaaatctgcgacctggaaggtcctgcattgcacaggccatattcacgtgtacgacaccaattcaaatcagccccagtgcgggtataagaagccaccgatgacatgtctcgtgttaatctgcgaacccatcccccacccaagtaatatcgaaattcccctcgatagtaaaactttcctcagtagacattcacttgatatgaagttcagctactgtgatgaacggatcaccgagctcatgggttatgagcctgaggagcttcttgggcggtctatttatgagtactatcatgccctggatagtgatcacttgacaaagactcaccatgacatgtttaccaagggacaagtaacaacaggccagtaccgcatgctagcaaagagaggggggtacgtgtgggttgagacccaggccacagtcatctataatacaaagaacagccaaccccagtgcatagtatgtgtgaattatgtagtaagtggaatcattcaacacgacctgatcttttcactgcaacagactgagtgcgtcctcaagcccgtagagagctccgacatgaagatgacgcagttgttcacgaaagtggaatcagaggatactagctcgctcttcgacaaattgaagaaggagcctgatgcccttacccttctggcccctgccgccggcgacacaattatttcattggatttcgggtctaacgataccgaaacagatgaccagcagctcgaggaagtgccactctacaacgacgtgatgctgccgtccccaaatgagaagctccagaatatcaatctggctatgagcccattgcccaccgccgaaacccccaaacctctccgcagctctgccgacccggccttgaaccaagaggttgccttaaaattagaacctaatcccgaatccttggagcttagcttcaccatgccccagattcaggaccaaaccccctctccgtctgacggcagcacaaggcagtcctcacctgagcccaattctccatcagaatattgcttttatgtggattccgacatggttaatgaattcaaattagaactggtggagaaactgtttgcagaagacacagaagctaagaaccctttttccacccaggacacagacctagatcttgagatgctggcgccttatatcccgatggacgatgacttccagctaaggtccttcgatcagctgagtcctctggaaagttcctctgcctcccccgaatccgcctcaccccagtcaaccgtcactgtgttccagcagactcagatccaggagccaacagccaacgctacaacaacgaccgctacaaccgacgagctgaaaacggtgacaaaggacaggatggaagacatcaagatactcattgcctccccaagcccgacgcatattcacaaggagactactagcgccacgtcaagtccctaccgcgacacccaatcaagaacggctagcccaaatagggcaggtaaaggggttatagagcaaacggaaaagagccatccacgctcccctaatgtgttgagcgtcgcgttaagtcagaggactaccgtcccggaggaggaactcaatcctaagatcctggccctgcaaaacgctcagaggaaacgaaaaatggagcacgacggctcactgttccaggcagtcggcataggtactctcctgcaacagccggacgaccatgccgctactacctccctgtcatggaagcgggtaaaggggtgcaagtcgtctgagcagaacggcatggaacagaagactatcattctgattccatctgacttggcctgcaggctgcttggccagagtatggacgaaagtggcttgccacaactcacatcctacgattgtgaagtcaacgcgccgatccagggatcccgcaatttgttacaaggggaagagctgctgagggctttggatcaggttaac

SEQ ID NO: 33097 - DNA, 2478 bp, synthetic construct
  misc_feature 1..2478: note = Description of Artificial Sequence: Synthetic coding sequence
  source 1..2478: mol_type = other DNA
atggagggcgccggtggtgcgaatgacaaaaagaagatttcctccgagaggaggaaggagaagtcaagggatgcagcccggtcccggcgctcgaaagagagcgaagtgttctacgaactggcccaccaactgcccctcccgcataatgtgagctcccacctcgataaggcctctgtcatgcgcctgactatctcgtacttgcgcgtccggaagctgctggacgcaggggacctcgacatcgaggatgatatgaaggcgcaaatgaactgtttctacctgaaggctctggacggtttcgtgatggtcttgactgacgacggtgatatgatctacatcagcgataacgtgaacaaatacatgggactgactcagttcgaattgaccgggcactccgtgtttgatttcacccacccatgtgaccatgaagaaatgcgggagatgctgacgcaccggaatggactggtcaaaaagggaaaggagcagaacactcagagatcattctttctgaggatgaaatgcacgctgacctcccgcggtcgcactatgaacatcaagtcggcgacctggaaggtgctccattgcaccgggcatatccacgtgtacgatactaatagcaaccagcctcagtgcgggtataagaaaccgccaatgacttgtctggtgctcatttgtgagcctatcccgcatccttccaatatcgaaatccccctggactccaaaacctttctctcgcggcactcgctcgacatgaagttctcgtactgcgatgaaagaatcacggaacttatgggatatgaacccgaagagctgctggggcgctcgatttacgaatactaccacgccctcgactccgatcatctgaccaagacccaccatgacatgttcaccaaggggcaggtgaccactggacagtatcgcatgctggcgaaacggggaggctacgtatgggtggaaacccaagcaaccgtcatttacaatactaagaatagccagccccagtgcatcgtgtgcgtgaattacgtcgtgtcgggaatcatccaacatgacctgatcttctctctgcagcaaaccgagtgcgtcctcaagcctgtggaatcctccgacatgaagatgacgcaactcttcactaaggtcgaatcggaggacacctcgtcattgttcgataaactcaagaaagagcctgacgccctcacgctgctcgctccggccgctggcgacaccatcatttcgctggactttggctccaacgacaccgaaaccgacgaccagcaactggaagaagtcccgctgtacaacgatgtgatgctcccaagccctaacgaaaagctccagaacatcaatctcgccatgtccccgctgcctactgccgaaactcccaagcctttgcgctcgtcggcggaccctgccctgaaccaggaggtggcgctgaagctggagccgaacccagaatcattggaactgtccttcaccatgccgcagattcaagatcaaactccatccccctccgacggatccacccggcagagctcgccagagccgaacagcccttcagagtactgcttctacgtcgactcggatatggtgaatgaattcaaactggaactggtcgagaaactgttcgcggaggacacggaagccaagaatccgttctccacccaagacactgatcttgacctggagatgctggcaccttacatcccgatggacgacgacttccagctgagatcatttgaccagttgtcaccgctggagtcgtcgtcagcatccccggaatcagctagcccgcagtcgaccgtcactgtgttccagcagacccagatccaagagccgactgcgaacgcaactaccacgactgctaccactgacgaattgaaaaccgtgaccaaggacagaatggaggacatcaagatcctcatcgcctcgccgtccccgacccacatccacaaagaaaccacgtccgccacttcctcaccctaccgggacacccagagccgcacggcatccccgaacagggccggtaaaggggtgattgagcagaccgaaaagtcccacccgcgctccccgaatgtgctgagcgtcgcactgtcccaaaggaccactgtgccagaagaagagctcaacccaaagatacttgccctgcagaatgcgcagcgcaagagaaaaatggaacacgacggctcattgttccaggccgtgggaatcggaacgctgctgcagcaaccggacgaccatgcagccaccacgtcgctgtcctggaagagagtgaaggggtgcaagagctctgaacaaaacggcatggagcaaaagacgatcatcctcatcccgtccgacctcgcatgcaggctgctcggccaaagcatggacgaatccggacttccgcaactcactagctacgattgcgaggtgaatgctccgatccaaggatccaggaacctgctgcaaggtgaagaattgctgcgcgctctggatcaagtgaac

SEQ ID NO: 33098 - DNA, 2478 bp, synthetic construct
  misc_feature 1..2478: note = Description of Artificial Sequence: Synthetic coding sequence
  source 1..2478: mol_type = other DNA
atggaaggcgcaggtggggctaatgataaaaaaaaaatttcttctgaaagaaggaaggaaaagtctcgtgatgcagcccgtagccgacggagcaaggaatctgaagtgttctatgagttggctcatcaacttccccttccccataatgtaagctcccacttagacaaggctagcgttatgaggttgaccattagctatcttagagtgcgtaagttgttggatgctggcgaccttgacatcgaggacgacatgaaggctcagatgaattgcttttatttgaaggctttagatggctttgtgatggttcttactgatgatggggatatgatttacataagcgacaacgttaataagtacatgggccttacacaattcgaacttactggccattcagtcttcgatttcactcacccttgcgatcatgaggagatgcgtgaaatgcttacccatagaaatggactggttaagaaggggaaagagcagaatactcaaaggtccttctttttgaggatgaagtgcactttgacatctagggggagaactatgaacatcaaatctgctacttggaaggttctccactgcaccgggcacatccatgtgtatgataccaactccaaccaaccccagtgtggttataaaaaaccccccatgacatgcttggtcctcatttgtgagcctatacctcacccctcaaatatcgaaattccactagattcaaagactttcctctctcggcattctttggatatgaagttttcttactgtgacgaaagaattacagagttgatgggctatgagccagaggaacttcttggaaggtctatttatgagtattatcatgctctagactccgatcatctcacgaaaacccatcacgatatgttcactaaggggcaggtcacaaccggtcaatataggatgctcgctaagaggggtggatacgtgtgggtagagacacaagctacagttatctataataccaagaatagccaaccacaatgtatcgtatgtgtgaattacgtggtatccggaattatacagcatgaccttatattctcacttcaacaaacggaatgcgttttgaaacccgtggaatcgagtgacatgaagatgactcaacttttcaccaaagtagaatccgaagatacttctagcttgttcgataagcttaagaaggagcctgatgcattgaccctgctggctcctgcagccggggatacaatcattagccttgatttcggtagcaacgataccgaaacagacgaccaacaactcgaggaggtgccgttgtacaatgatgtgatgctgccttcgccgaacgagaagcttcagaacattaacctggcaatgtctcctttgcctaccgctgagacaccaaagcctcttagaagtagcgccgatcctgccctgaaccaagaagtagctcttaaacttgaacccaaccccgaatctttagagcttagcttcaccatgccgcagatccaagatcagaccccttctccttctgatggatctactaggcaaagctcgcctgaaccaaattctccatcagaatattgtttttacgttgattcagatatggtgaatgagttcaagctagagcttgttgaaaaactcttcgccgaagataccgaagctaagaacccgttttcaacccaagatacagatcttgacctggaaatgctcgccccttacatacctatggatgacgatttccagctcagaagtttcgatcaactctcaccactcgaaagctcgtctgcttcgccagaatcggcatctcctcagtcaactgttactgtctttcaacaaacacaaattcaagaaccgactgccaacgccactacgacaactgccaccacggatgaattaaagacagttacaaaggaccgcatggaagatattaagatcttgatagctagcccatcgcctactcacattcataaggaaactacctccgcaacttcttccccgtaccgtgatacacaaagtaggacagcatcgcctaatcgtgccggtaaaggagtgatagaacagactgaaaagtcacacccccgctctcccaacgttctctccgttgctttatcgcaacggactaccgtgcctgaagaagaactgaatccgaagatactcgctttgcaaaatgcccagcgaaagcggaaaatggagcatgatggtagcctgttccaagcagttggtattggaactcttctgcagcaacctgacgatcatgcagcaactaccagtctctcgtggaaaagggtaaagggttgcaagtcttctgaacaaaacgggatggaacaaaagacgattattttgatcccgtcggatttggcttgtaggctattaggtcagtcaatggatgaatctggcctgcctcagctcacctcttacgattgcgaagttaacgcacctattcaggggtcacgcaatttgcttcaaggagaagaactcttgagagcacttgatcaggttaat

SEQ ID NO: 33099 - DNA, 2478 bp, synthetic construct
  misc_feature 1..2478: note = Description of Artificial Sequence: Synthetic coding sequence
  source 1..2478: mol_type = other DNA
atggagggtgctggcggagccaacgacaaaaagaaaatctccagcgagcgacgcaaagaaaaatcacgggatgccgcacgctcacgccggtcaaaggagagtgaggtcttctacgagcttgcgcatcaattaccacttccccataacgtgtccagccacttggataaagcctccgtcatgcggctgaccatttcctacctgcgggttaggaagctgcttgacgctggagaccttgatatcgaggatgacatgaaggcgcagatgaactgcttctacctcaaggccttggacggctttgtaatggtactcaccgatgatggcgacatgatttatatctccgataatgtgaataagtatatgggtctcacccaatttgagctaaccgggcactcagtattcgacttcacgcatccttgcgaccacgaggaaatgagggagatgctgacgcatcggaacggcctggtgaagaaggggaaggagcagaatacacagaggtcatttttcctccggatgaagtgtacactgacttccagaggcaggaccatgaacattaaaagcgcgacctggaaggtgctccactgtaccggacacatccacgtctacgacactaattcaaatcagcctcagtgcgggtacaaaaaacccccaatgacctgtctcgttctgatatgtgagccgatcccccatccctccaatattgagatccccttagattcaaagactttcctgagcaggcacagtttggatatgaaattctcttattgtgacgaacggatcactgagctcatgggctacgagccagaggagttactcgggcggagtatatacgaatactatcacgctctggacagcgaccacctgacaaaaactcatcatgatatgttcactaagggccaggtcacgaccgggcagtacaggatgctggccaagagagggggctacgtttgggttgagacccaagcgacagtgatctacaacactaagaatagccagcctcagtgcattgtttgcgtgaattatgtggtatctgggattatccagcacgatctgatcttctccctgcaacaaacagagtgcgttctgaagcctgtggagagcagtgatatgaaaatgactcagctgtttactaaggtggagagtgaggatacgtcatccctttttgataagctgaaaaaggagccggacgctctgacgctcctcgcaccagccgccggggacacaatcatctcgcttgatttcggaagcaatgatactgagaccgacgatcagcagttggaggaggttcccttgtataacgatgtgatgctgcccagccctaacgagaaactccagaatatcaatctcgccatgagtccacttcctacagccgaaaccccgaagcctttaaggtctagtgcagatccagcgctcaaccaggaggtagccctgaaactcgagcctaatccagaaagcttggagctgagcttcacaatgcctcagatccaagaccagaccccaagcccatccgacggctccacaagacagtctagtccagaaccaaattctccttccgagtattgtttttatgttgactcagatatggttaacgagttcaagttagagctggttgaaaagctgttcgccgaggacaccgaggccaagaaccccttcagcactcaggatacggacttggatctcgagatgctggcgccctatattcccatggatgatgatttccagctgagaagcttcgatcagctttctcccctggaaagctcctctgcgagtccagaatcagcatctccccaaagcacggtgaccgtcttccaacagacccagatccaggagcccacagccaatgccacaacaactactgcaacaacggacgagctcaaaacggtcaccaaggaccggatggaagatatcaagattctgatcgccagccccagtccaacccacattcacaaagagacaacctctgccacctctagcccgtacagggacactcagagcaggacagcctcacctaatagggcagggaaaggcgtcatcgagcagacagagaagtctcatccccgctctcccaatgtcctctcggtggctctctcccagcgcactaccgtgcctgaggaagagctcaatcctaagatcctggctttgcagaacgcacagcgaaagaggaagatggagcacgatggcagtcttttccaggccgtaggtattggcacactcctgcagcagcccgacgatcacgccgccactacctcactcagctggaagcgcgttaaagggtgtaagtccagtgaacaaaacggaatggagcaaaagaccataattcttataccctcagacctggcatgccgtttactgggccagtcaatggatgagagcggcctcccacagctcacctcctacgattgcgaagtgaatgcgccaatccagggatcgaggaatctgctgcagggcgaagaactgctgcgggccctggatcaggtgaat

SEQ ID NO: 33100 - DNA, 2478 bp, synthetic construct
  misc_feature 1..2478: note = Description of Artificial Sequence: Synthetic coding sequence
  source 1..2478: mol_type = other DNA
atggaaggcgcaggtggagccaacgacaaaaagaagatctcctcggagagacgcaaagaaaagagcagagacgcggcaagaagccgacgatcgaaggaatccgaggtcttttacgagctcgcgcatcagcttcctttgccccataacgtgagctcccatctggataaggcctcggtcatgcgactgaccatttcgtaccttcgtgtcagaaaacttctggatgcgggcgatctggacattgaagatgacatgaaagcccaaatgaattgtttttaccttaaggcgctggatggtttcgtgatggtcctcactgatgacggagacatgatctatatctcagataatgtgaacaaatacatgggattgacgcagtttgaactgaccgggcatagcgtgttcgatttcactcatccatgcgatcatgaggagatgcgggagatgctcacccaccgcaacggactggtgaagaagggaaaggaacagaacacccaacggagcttctttcttaggatgaaatgtactcttacttcaagaggccggaccatgaacattaagtcagcaacctggaaggtgctgcattgcaccggacatatccatgtgtacgatacgaactcgaaccagcctcaatgtggttataagaaacctccaatgacctgcctggtcctgatttgcgaaccaataccccatcctagcaacattgaaatcccccttgatagcaagacttttctttcccggcattcacttgacatgaagttttcctactgtgatgaaagaatcactgaactgatgggctacgaacctgaagaactccttggccggagcatctacgagtactaccatgcacttgattcggaccatcttactaagacgcatcacgacatgtttaccaagggacaggtgacgaccggacaataccgaatgctggcgaagcggggtggctacgtgtgggtggaaacgcaagcaactgtcatatacaataccaagaattcgcaaccacaatgtattgtgtgtgtgaactacgtggtcagcggaatcattcaacacgatctgatattctcgctgcaacaaactgagtgtgtcctgaaacccgtggaatccagcgatatgaagatgacccagctgtttactaaagtcgaatcggaggatacctcctcactgttcgacaaattgaaaaaggaaccagatgccctgactctgctggcgcccgcagcaggggataccatcatttcactggattttggttccaacgataccgaaactgacgatcaacaacttgaagaggtgcccctgtacaacgatgtgatgctcccgagcccaaacgagaaacttcaaaacataaaccttgctatgagccctctgcctaccgccgagactccaaaacccctcagatcatctgcggaccctgcgctgaatcaggaggtcgcacttaagctggaacctaatcctgaatcactggagctctcttttaccatgcctcaaattcaagatcagaccccatcgccgagcgacgggagcaccagacaatcaagccccgagccaaacagcccaagcgaatactgtttttacgtcgattccgacatggtcaatgaattcaaattggagctggtagaaaaacttttcgctgaagataccgaagcaaaaaacccctttagcacgcaagacaccgaccttgacctggaaatgcttgcaccatacatccctatggatgatgattttcagctccgcagcttcgatcaactttcccctcttgaatcatcgtcggcatcacctgagtcggcatcgcctcaaagcactgtgactgtgttccagcaaacccaaattcaagaacccactgcaaatgcaactactactacggcaaccaccgatgagcttaagactgtcactaaggacaggatggaagatatcaagatacttatcgcatccccttcgcctacccatattcacaaggaaacgacttcggcaacttcgtcgccatacagagatacgcagtcaagaaccgcatccccaaaccgcgcaggaaagggtgtgatagaacagactgagaagtcgcatccaaggagcccaaatgtcctttctgtggcactcagccaacgtaccactgtgcctgaagaagagcttaatcccaagattctggcgctgcagaatgcacaaagaaagcggaagatggaacatgatggctccctgtttcaggcggtcggaattggtacgcttcttcagcagcctgatgaccacgccgcaaccacttcgctgtcctggaagagagtgaagggctgtaagtccagcgagcagaatgggatggaacaaaagaccattattctgattccgtccgacctggcatgtcgcctgcttggacaaagcatggatgaatcaggacttccccaactcacttcatacgattgcgaggtgaacgcgccgatacaaggatccagaaatcttttgcaaggcgaagagctgcttagagcacttgaccaggtcaac

SEQ ID NO: 33101 - DNA, 2478 bp, synthetic construct
  misc_feature 1..2478: note = Description of Artificial Sequence: Synthetic coding sequence
  source 1..2478: mol_type = other DNA
atggaaggcgccggcggtgcgaacgataagaagaagatatcaagtgagcggagaaaggagaaaagcagggatgcagcccggtcgcggcgatctaaagaatcagaggtcttttacgagctcgctcatcaattgcctctgccccataacgtgtcaagccatctggataaagcctctgtaatgcggttgacgatttcatacctgagggttcgtaagttgctcgatgcgggcgatctggacattgaggacgatatgaaagcccaaatgaactgcttctacctgaaggcgctagacgggtttgttatggtcctgacggacgacggggacatgatctacataagcgacaatgtgaataagtacatgggactgacacaatttgagctaacaggacatagcgtgttcgactttacccatccttgtgatcacgaagagatgagggaaatgttgacccaccgtaatggcctggtcaaaaagggtaaggagcagaacacccaaagaagcttttttttgaggatgaagtgtaccctgaccagccgagggcggaccatgaatatcaagtctgccacctggaaggtgttgcactgcacaggacacatacacgtgtacgataccaactcaaaccagcctcaatgtgggtataaaaaacctcccatgacctgcctggtgcttatctgtgaacccatccctcacccttcaaatattgagatcccactggattctaagacctttttgtctcggcactccctggatatgaagttcagctactgcgacgagaggatcactgaactgatgggctacgagcccgaggaactgctggggcgctctatttacgaatactaccatgccctagacagtgatcaccttacaaaaacacaccacgatatgtttacgaaaggacaggtgacgacaggtcagtacaggatgctcgcgaaaaggggaggctacgtctgggtggaaacacaggctacagtgatttacaacacaaaaaactcccagccccagtgcattgtctgtgtcaactatgtggtgtccggaataatccagcatgaccttattttcagcctgcagcaaactgaatgcgtcctgaagccggtggaaagcagcgacatgaagatgacacagcttttcactaaggtggagtccgaggacacttcatcactctttgacaagcttaagaaagaacctgatgctctgaccctgctagcacctgccgccggcgacactataattagcctcgattttggatctaatgacacagaaaccgatgaccaacagctggaagaggtcccgctgtacaacgatgtcatgttgccctctccgaacgaaaaattgcagaatattaatctggccatgtcgcccctacccactgctgagacaccaaagccactgcgaagctcagccgatcctgctctgaaccaggaggtggctctaaaactcgaacctaatcccgagagtctggagctgagctttaccatgcctcaaatccaggaccagacacccagtcctagcgatggttcaactaggcaatctagccccgagccaaactccccctcagagtactgcttctacgtggactcagatatggtaaacgaatttaaacttgagttggtggagaagcttttcgcagaagatacagaagccaagaatccattttccacacaggataccgatttggacctggagatgttggccccttacattccgatggatgatgatttccagctgaggagtttcgatcagctgagtcctcttgagagtagctcagctagtccagagtccgcaagtccacagagcaccgtgactgtgttccagcaaactcagattcaggagcccactgccaacgcaaccactaccaccgcaacaacagatgagctaaaaacggtgacgaaggataggatggaggacataaaaatactgatagcaagcccctctccaacacacattcacaaagaaacaacgtctgcaacttcatcgccttaccgggatactcagtctaggacagcaagtccaaatagggccggcaagggggtgattgagcagactgaaaagtctcatcctcgatctccaaatgttctgagcgtggcactctctcagcgaacaaccgtgcccgaagaggagctgaacccaaaaattctggctctccagaacgctcagcggaaaagaaagatggagcacgacgggagcctattccaagccgtcgggatcggtaccttactgcagcaacctgacgaccacgctgctaccacctctttgagctggaaacgcgtgaaaggatgtaaaagtagtgagcagaatggaatggaacagaagactattatccttataccatccgacctagcctgccgtcttctgggacaatcaatggacgagtctggcttgcctcagctgacaagttatgattgcgaggtcaacgctccaatccaggggagcaggaatctgctccagggcgaggaactgctccgagcactggaccaggtaaac

SEQ ID NO: 33102 - DNA, 2478 bp, synthetic construct
  misc_feature 1..2478: note = Description of Artificial Sequence: Synthetic coding sequence
  source 1..2478: mol_type = other DNA
atggaaggtgcaggaggagccaatgacaagaagaaaatctcgagcgaaagacgtaaggaaaagtcacgggacgcagcgcgcagcaggcgctcaaaggaatccgaagtgttctacgagctcgcacatcaacttccacttcctcacaacgtgtcgtcgcatcttgataaggcaagcgtgatgaggcttacgatttcgtacctcagagttagaaagctcttggatgcaggagatctggatattgaagatgatatgaaagcacaaatgaattgtttttacctgaaggcactggacggtttcgtgatggtgctcaccgatgatggagatatgatctacatctcggataacgtgaataagtacatgggacttacgcagtttgaacttaccggtcactcagtgtttgattttactcacccttgtgatcatgaagaaatgcgggaaatgctcacccatcgaaacggtctggtgaaaaaaggtaaagaacagaacacccagcgctcttttttcctcagaatgaagtgcactcttacctctcgtggacggactatgaatatcaagtcggcaacctggaaggtgcttcattgtaccggacatatccacgtgtacgataccaattctaaccaacctcagtgtgggtacaagaaacctcccatgacttgtcttgtgctgatttgcgagccaatcccacacccttcaaacattgagatcccactggactctaagacctttttgtccagacattccctggacatgaaattctcttactgcgacgagagaataactgagttgatggggtacgagccagaggagctgcttggaaggtccatttacgaatactatcatgctctcgattcagaccatctgaccaagacccaccatgatatgtttaccaagggacaggtgaccactggacagtacagaatgctggcgaaacgaggagggtacgtgtgggtcgaaactcaagcaacggtgatctacaataccaagaattcgcagcctcagtgcattgtgtgcgtgaactatgtggtttcaggaatcatacagcacgatctgatcttttcgctccagcagactgaatgtgtgctgaagcctgtggaatcgtcagatatgaagatgacgcagctcttcacgaaagtcgagtcggaggatacctcctccctttttgacaaacttaagaaggagcctgatgccctgaccctccttgcaccagctgcaggtgatactatcatatccctggactttggatctaatgatactgaaaccgatgaccaacaactggaagaggtgcctctgtataatgatgtgatgctgccttcgccgaatgaaaaactccagaatatcaaccttgcaatgtcgcccctcccaacggcagaaactccaaagcccctgagatcctcggccgatcctgcgctgaatcaagaggtcgccctgaaactcgaacctaaccctgagtcactggagctcagcttcactatgcctcaaatacaagaccagaccccgtcaccatcggacggcagcacccgacagagctcccctgaaccaaattccccttccgaatactgcttttacgtggattcagacatggtgaacgaattcaagctggaactggtggaaaagctgtttgcggaggataccgaagcaaagaatccattctccactcaggataccgatcttgacctggaaatgctggccccttacatacccatggatgatgattttcagctgcgttcatttgatcaactgtcacctctggagtcgtcctccgcttccccagaatccgcatcgccgcaatcgactgtcacggtctttcagcaaacccagattcaggagcccaccgcgaacgctacgaccaccactgcaactaccgacgaacttaagaccgtgaccaaggatcggatggaagatatcaagatccttattgcctcgccgtccccgacccatatccataaggagacgacctcggcaacctcgagcccgtacagagatacccagtccagaacggcctcaccaaacagggcaggaaagggtgtcatcgagcagaccgaaaagagccatcctagatcgcccaacgtgctttccgtcgccctgagccagcggaccactgtcccagaggaggaacttaacccaaagattttggctctgcaaaacgcacagcgcaaaagaaaaatggagcacgacggaagcctcttccaggctgtcgggatcgggactctcctccaacagcccgatgatcatgccgccaccactagcttgagctggaagcgcgtcaaaggatgtaagtcctcagagcaaaatggtatggagcaaaaaactatcattctgattccttccgatctggcatgtagactcctgggacagtcgatggacgaaagcgggcttcctcagcttacctcatacgactgcgaagtcaacgcgcctattcagggaagccgtaatctccttcagggcgaggaactgcttcgagccctggaccaggtcaac

SEQ ID NO: 33103 - DNA, 2478 bp, synthetic construct
  misc_feature 1..2478: note = Description of Artificial Sequence: Synthetic coding sequence
  source 1..2478: mol_type = other DNA
atggagggtgccggaggcgctaacgacaagaaaaagatttcaagtgaaagacggaaagagaaatcacgggacgcggcccgcagtagacggagtaaggagtctgaggtgttttatgaattagcccatcagctgccgctgccccataacgtgagttcgcatctggataaggcaagtgtgatgaggcttaccatctcgtacctgagagttagaaaactactggacgcgggggatctggatattgaggatgatatgaaagcacaaatgaattgcttttacttaaaggcactcgatggcttcgttatggtgttaacagacgacggagacatgatatacattagcgataatgtcaataaatacatgggcctgacacaatttgagctgaccgggcatagtgtgtttgatttcacacacccctgcgatcacgaagagatgagagaaatgcttacacacaggaatggcttggttaagaaaggtaaagaacaaaacacgcagcggagcttcttcttgagaatgaagtgtaccctgaccagccgggggcgaacgatgaatatcaaatccgctacctggaaggtcctgcactgcactggacacattcatgtgtatgataccaacagcaaccagccccagtgcggctataaaaagcccccaatgacctgcctggtgctgatatgcgagccaattccgcatccctccaatatcgagatcccgcttgacagtaaaaccttcctttctcgccactcactcgatatgaagttcagttactgcgatgaacggatcaccgagctgatgggctatgagccagaggaacttctgggcaggagcatatacgaatattaccacgcgctcgattccgaccacctgaccaaaactcaccacgatatgtttactaaagggcaggttaccacgggtcagtaccgcatgttagctaagcgcggcggttatgtgtgggtggagacccaggccacagttatttacaacaccaaaaattcccagccccagtgcatcgtgtgcgtgaactacgtggtgagcgggatcattcagcacgatctcatattttccctgcaacagacggagtgcgtcctgaagcctgtggagagcagcgatatgaaaatgacccagttgtttactaaggttgagagtgaagatacttcaagccttttcgacaaattaaagaaggaacccgatgccctgaccctgttggcccccgccgcaggcgacactattataagtctcgattttgggtcaaacgacaccgaaacagatgaccagcagctcgaagaggttcccctgtacaatgatgttatgctcccctcaccaaacgaaaagctgcagaacattaacctagcaatgagccccctgcccacagccgagacacctaaacctctcagatcctctgcagatcctgcactgaatcaggaggtcgctttgaagctggaacccaatcctgagagtctggaactctcattcacaatgccccagattcaggatcagacaccatccccatcagatgggtctactaggcagtcatctcctgagcctaactcccccagcgagtactgcttttatgttgacagcgatatggtgaatgagttcaaactggagctggtggaaaaactgttcgcagaagatacggaagcgaagaacccattctccactcaggataccgacctggatcttgaaatgctggccccctatattccaatggacgacgacttccaactacgaagtttcgaccaattgtctccgcttgaaagctcttctgcttctcccgagagcgctagccctcagtcgaccgtaactgtgttccagcagactcagatccaggagcctactgccaatgctacaaccacaactgctaccaccgatgaactcaaaacagtcaccaaggaccgtatggaggacataaagatcctgatcgcatcacctagtccaactcatatacacaaggagaccacttcagccacttcatccccctatagagatactcagtctcggactgcttcacccaaccgagccggaaagggggtcatcgagcagaccgaaaagtctcacccccgatctccaaacgtcctgtctgtggcccttagccagcgcaccaccgtgccagaagaggagcttaatcctaagattctagccctgcaaaacgcacagcgaaagcgcaaaatggagcacgacgggtcactctttcaagccgttggcatcggtacactcttgcaacaacccgacgatcacgcggcaacaaccagcctctcttggaagcgagtgaaggggtgcaagagctcagaacagaacggcatggagcagaagacgatcatccttattccatcagatctggcgtgtcggctgctcggccagtccatggacgaatccggtttaccacagctaaccagctacgactgtgaggttaatgctcccatccaagggtctcggaacctcctgcagggggaagagctgctacgcgccctcgaccaggtgaat

SEQ ID NO: 33104 - DNA, 2478 bp, synthetic construct
  misc_feature 1..2478: note = Description of Artificial Sequence: Synthetic coding sequence
  source 1..2478: mol_type = other DNA
atggaaggtgcaggcggtgcaaacgacaagaagaagatatcatccgaacggagaaaggaaaagagccgggacgcagcccgctcgagaagaagcaaggagtcggaagtgttttacgagctggcacatcagctgcctcttccccacaacgtctcgtcccaccttgataaggcatccgtcatgagactcactatttcctaccttagggtgcggaagctgctcgacgccggcgatcttgatatagaggacgacatgaaggcccaaatgaactgcttttacctgaaggcacttgatgggttcgtcatggtccttactgatgatggggatatgatttacattagtgataacgtgaacaagtacatgggactcacccaattcgaactgactggtcattcggtgttcgacttcacccatccttgcgaccatgaagagatgagggaaatgcttactcacaggaatggtctggtgaagaaaggcaaggagcaaaacacgcagagatcattcttcctcagaatgaagtgtaccttgacctcgcggggtcgaaccatgaatatcaagagcgccacctggaaggttctgcactgtaccggccatattcatgtgtacgatactaactcgaaccagccacaatgtggatacaagaagccgcctatgacttgtcttgtgctgatttgtgaaccaatccctcatccctccaacattgagattcctcttgatagcaagactttcttgtctcggcattccttggatatgaagttttcatactgtgacgaacgcattaccgagttgatggggtacgaacccgaagagttgttggggcgaagcatttacgaatactaccacgcactcgactcggatcatctcaccaagactcaccacgacatgtttacgaagggtcaggtcaccactggacagtaccgcatgctggcgaagcggggtggttacgtgtgggtggaaactcaagcaactgtcatttacaacaccaaaaactcgcaaccacagtgtatcgtgtgtgtgaactacgtggtgtcgggaattatccagcacgacctgatcttttcgctccaacagaccgaatgtgtcctgaagcctgtggaaagcagcgatatgaagatgacccagctttttacgaaagtggaatcggaagatacctcctcccttttcgataaactcaaaaaggagccagacgcactgactctgcttgcacctgccgccggtgatactatcatttcgctggacttcggaagcaatgataccgagactgatgaccagcaacttgaggaagtcccgctttacaacgatgtgatgctcccatcacctaatgagaagctgcaaaacattaatctggcaatgtcaccactgccgaccgctgaaactcccaagccactgagaagctcggctgatcctgctctcaaccaagaagtcgcactgaagctcgagcctaatccagaatcacttgaactgtcttttaccatgcctcaaatccaagatcagacgccatctccctcagacggatcaacccgtcagagcagccccgaacctaattcaccttccgaatactgcttctacgtcgactccgatatggtgaacgagtttaaacttgaattggtggagaaactgttcgcggaagataccgaagcaaagaaccccttttcgactcaagacaccgatcttgatctcgagatgcttgcaccctatataccaatggatgatgactttcagctccgctcatttgatcaactctctccgcttgaaagctccagcgcatcacccgaatccgcctcaccacaatccacggtgaccgtgttccagcaaacccagatccaagaacctaccgcaaatgctaccacgactaccgccacgactgacgagctcaaaaccgtgaccaaggatcgtatggaagatatcaagattcttattgcatcaccgagcccaacccatattcacaaggaaactacttccgcaaccagctcgccttacagggacacccagtcgagaacggcttcgccgaaccgggcaggcaagggagtgatagagcagaccgaaaaaagccatccacgttcccctaacgttctttcagtggccctctcacaacggactactgtccccgaggaagaactgaaccctaagattctcgcacttcagaacgcacagcgcaagcggaagatggagcatgatggatcgctttttcaggcagtgggaattgggacgcttctgcaacaaccagatgaccatgcggctactacctccctgtcatggaagcgcgtcaaggggtgtaaatccagcgaacaaaatgggatggaacaaaagactatcattctgattccttcagacctggcatgccggcttctcgggcagagcatggatgaatcaggtctgcctcaactcactagctacgactgtgaagtcaacgcgcctatccaagggtcgcggaaccttcttcagggagaagagctgctgcgggcacttgaccaggtgaat

SEQ ID NO: 33105 - DNA, 2478 bp, synthetic construct
  misc_feature 1..2478: note = Description of Artificial Sequence: Synthetic coding sequence
  source 1..2478: mol_type = other DNA
atggagggtgctggcggggctaatgacaagaagaaaattagctctgaacgtaggaaagaaaaaagccgggacgccgctagatcgagacgctccaaggaatccgaggtattctatgaattggcacaccaattgcctctcccgcataacgtttcctctcatctggacaaggcctcggttatgcggctgacgatttcttatcttcgcgtgcgcaaattactagatgctggggacctcgacatcgaggatgatatgaaggcacagatgaactgcttttatctgaaggccctggatggctttgttatggtgctgacagatgacggtgatatgatctatatctctgacaacgtgaataagtatatgggtctgacccagtttgaactgaccggacactcagtgttcgacttcacccacccatgtgaccatgaggagatgcgggaaatgttgacacataggaatggattagtaaagaaaggaaaagagcaaaatacacaacgatcctttttccttagaatgaagtgcaccctcacctcccgcggtagaactatgaatattaaatcagccacttggaaggtcctgcactgcaccggtcacatccacgtatacgacactaactccaaccagccacagtgcggttacaaaaagcccccaatgacctgtctcgtgcttatctgtgagcccatccctcaccccagcaatatcgagattcctcttgatagcaagactttcttatccagacattccttagatatgaagttcagttattgcgacgagcggattacagaactgatgggatacgagcccgaggagctcctggggagaagcatttatgaatattaccacgcactggattcagatcacctgacgaagacccatcacgacatgtttacgaaaggccaggtgaccactggccaataccgtatgcttgcgaaaaggggcggatacgtgtgggtcgaaacccaggctaccgtcatttataatacaaaaaacagccagcctcagtgtatcgtgtgtgttaactacgtcgtaagcgggatcatccaacacgatctgatcttttctctccagcaaacagaatgtgtgttaaagccagttgaatcctctgacatgaagatgactcagctgttcacaaaggtagaatcggaggatacaagctcactgttcgataaattgaaaaaagaacctgacgccctcacactcctcgctccagcagctggtgataccattatctctctggattttggcagcaacgatactgagacagacgatcagcagctagaagaggtgccactctataatgatgtcatgctgccctcccctaacgaaaagctccagaatattaatctggccatgagccctctaccaaccgccgagacaccaaagcctctcagatccagtgccgatccagctctaaaccaggaggtggccctgaagttggagccaaatcccgagagtcttgagctatctttcactatgccccaaatacaggaccagacaccctccccttcagatgggagcacccgccaaagctctccagagcctaatagtccaagtgaatactgtttctatgttgactccgatatggtgaacgaatttaaactggaactggtggagaaactcttcgccgaggacaccgaggccaagaatcccttcagtactcaggatactgacctggacttggagatgttggccccgtatattcccatggacgatgacttccagctgagaagcttcgatcagctgagtccactagagtcttctagcgcgtctccagaaagcgcttctccccagtccaccgtgacagtgtttcagcagacacaaatccaggagcctactgccaatgcaactaccaccacggctactacggacgaactaaaaacagtgacaaaggacaggatggaagacataaagatattaatcgcctctccttctcccacacatatccacaaagaaacaacttcggcaacatcaagcccctaccgggatacacagtcgaggacagcaagccctaacagagctggcaaaggcgtgatcgagcagaccgaaaagagtcatcctcggtccccgaacgtcctctctgtggctctgtcacagcgcaccactgttccagaggaagaactcaacccgaagatcctagctctgcagaacgctcagcgaaagcgaaagatggagcacgatggctctctgtttcaggccgtagggatcgggacccttctccagcagccagatgatcacgctgccacgacctctttgagctggaaaagggtaaaaggctgtaagagcagcgaacagaatgggatggagcagaagaccataatacttatcccgtccgacctggcttgccgattgttgggacagtccatggatgagtcaggcttgccgcagctgacatcatacgactgtgaggttaacgcccctatacaaggcagtcggaacctgctgcagggcgaagagttattgcgcgcactcgatcaggtgaat

SEQ ID NO: 33106 - DNA, 2478 bp, synthetic construct
  misc_feature 1..2478: note = Description of Artificial Sequence: Synthetic coding sequence
  source 1..2478: mol_type = other DNA
atggaaggcgcaggcggtgccaacgacaaaaaaaaaatttcttcggagcgacgcaaggaaaaatctagggacgcagctcgtagtcgacgtagcaaggagtcggaggtcttctacgaacttgcgcaccagctccccctaccacataatgtctcatctcatcttgataaggcttccgtaatgaggttgaccatttcctatctgagagttcgcaaactgctcgacgctggagaccttgacatcgaagatgatatgaaagctcagatgaattgcttctatctcaaggccttggatggcttcgtgatggtgcttacagatgatggcgatatgatttatatttcagataacgtaaacaagtacatggggctgacacaatttgaacttacgggccatagtgtattcgatttcacccatccttgcgaccatgaagaaatgcgcgaaatgttgactcatcggaacggtctagttaaaaaaggtaaggagcaaaacacccaacgctctttcttcctgcgtatgaaatgcacactgactagcagaggccgcacaatgaatattaaatccgctacctggaaggttttgcattgcacgggtcatattcacgtttatgacacaaactccaatcaaccgcaatgtggatacaagaaaccaccaatgacgtgcctcgtcctaatctgtgagccaattccacatccatctaatattgaaatccctttggattccaagacctttcttagtcggcactcactcgacatgaaattcagttactgcgatgaacgtataacggagttgatgggttacgaacctgaggaactcttgggcaggagtatatatgaatactatcacgcgctcgattccgaccatctaacaaagacacaccacgacatgttcactaagggacaagtaaccacaggccagtaccgcatgcttgccaagcgcggtgggtatgtctgggtggagacgcaagccacggttatctataatacgaagaactctcagccccagtgcattgtttgcgtcaactacgttgtctcgggaatcattcaacatgaccttatattctcacttcaacagacggaatgcgtcttaaagccggttgaaagcagcgatatgaaaatgacccagcttttcactaaagtggagagcgaggatacgagcagcttgtttgataagttaaaaaaggagccggacgccctgaccctactcgcgcccgccgcaggtgataccataatcagcttggatttcggatcaaatgatactgaaacagacgatcagcagctggaggaggttcctctttacaacgacgttatgctcccgtcacctaacgaaaagctacaaaatatcaatcttgccatgtcaccactgccgactgctgaaacccctaagccccttcgctcatcggctgaccctgcgctcaatcaagaggtcgccctaaagttggagcccaatcctgagtccctcgagctgtcgttcactatgccgcaaatccaggatcagacccccagcccctccgacgggtcgactcggcagtccagcccggaacccaattccccgtctgagtactgcttttacgtggattcggacatggttaatgagttcaagctcgaacttgtcgagaagctcttcgcggaagacaccgaggcaaagaacccgttcagcacacaagatacggacctggatttggagatgcttgctccttacatacctatggatgatgatttccagctgagatcgttcgaccaactgagcccacttgagagttcttcagcgtcgcccgagtcagcttctccccagtccacggtgacggttttccaacagacgcaaatccaggagcccacggctaatgcgaccactactaccgcgaccaccgacgaactgaagaccgtgactaaagatcgtatggaagatataaagatcctcattgcaagccccagtccaacgcatatccacaaggaaactacatctgccacgagttctccgtatcgggatactcagagccgcacggctagtcctaatcgggcaggtaaaggtgttatcgagcagaccgagaagtcccatcctcggagccctaatgttctctctgtggctctgtcccaacggactaccgtcccagaggaggagctgaatcccaagatacttgcactgcagaacgctcaacgtaaacgcaaaatggaacacgacggatccttattccaggcagtcggtattgggacactgcttcagcaaccggatgaccatgctgccaccaccagcttgtcttggaaacgggtaaaaggctgcaaatcgagtgaacagaacggtatggagcagaaaaccatcattctgatccctagtgaccttgcgtgccgattgctcggccagtctatggatgagagcggtttaccacagttgaccagttatgactgcgaagtcaacgcacctattcagggttcacgaaatctcctccaaggcgaagagttgctcagagctttagatcaggttaat

SEQ ID NO: 33107 - DNA, 2478 bp, synthetic construct; identical to SEQ ID NO: 33084
  misc_feature 1..2478: note = Description of Artificial Sequence: Synthetic coding sequence
  source 1..2478: mol_type = other DNA

SEQ ID NO: 33108 - DNA, 2478 bp, synthetic construct
  misc_feature 1..2478: note = Description of Artificial Sequence: Synthetic coding sequence
  source 1..2478: mol_type = other DNA
atggaaggggcaggcggtgcaaacgacaagaaaaagatttcctcggagagaagaaaagagaagtcgcgggacgcagcaagatcaaggcgctcaaaggagtcggaagtgttttacgaattggcccatcaactgccgctgccacataacgtgtcgtcacacctcgataaagcaagcgtgatgcggttgaccattagctaccttcgggtgagaaaactgctggatgccggagatctggatatcgaagatgacatgaaggcacagatgaactgtttttaccttaaggccctggacggatttgtgatggtgctcaccgatgatggagatatgatctacatctccgacaatgtgaataagtacatgggtttgactcaatttgaactcactggtcattcagtttttgatttcacgcatccttgtgatcacgaggaaatgcgggaaatgcttacccatagaaacggcctggtgaagaaaggaaaggagcagaatacccagaggtcattctttcttcgtatgaagtgtacgctgacttcgagaggtcgcacgatgaacataaagtcggccacctggaaggtgttgcactgcaccgggcatattcatgtctacgacacgaattccaatcagccccaatgcggatacaagaagcctccaatgacttgcctggttctcatctgtgagcccatcccccacccaagcaacatcgagattcctctcgattctaaaactttcttgagtcgccacagcttggatatgaaattctcctactgcgatgagcgaatcacggaactgatgggttatgagccagaagaactccttggaagatccatctacgagtattaccatgccctggacagcgatcatcttaccaaaacccatcacgacatgtttaccaaagggcaagtcactaccggtcaataccgtatgcttgctaagcgcggcggatacgtgtgggtggaaacccaagctactgttatctacaacacgaagaattcgcagcctcaatgcattgtctgcgtcaactatgtggtttcaggcattattcagcatgacctgatcttttcacttcaacagacggaatgtgtgctcaaaccagtcgagtcaagtgatatgaaaatgacccaactttttactaaggtggagtcggaagatacttcctcactgttcgataaacttaagaaagaacccgacgcgttgaccctccttgcaccagccgcgggggataccataatctctctcgactttggaagcaatgacacggaaactgatgatcaacaactcgaagaagtgcccctgtacaacgacgtgatgctgccttcacctaacgaaaagttgcaaaacataaatcttgcaatgtcgccgctgcctacggctgaaactcccaaaccacttagatcgagtgctgaccctgcgcttaaccaagaggtggcacttaaacttgagcctaaccccgagtccttggaactttcgtttacgatgcctcagattcaggatcagaccccctccccatccgatggatccacccgtcagagttcgcctgagcctaactccccaagcgaatactgtttctacgtggatagcgacatggtgaacgagtttaaacttgaacttgtggagaaacttttcgcggaagataccgaagcgaagaacccatttagcactcaagataccgatcttgatctggaaatgctggccccttacattcctatggatgatgattttcagctccggtcgttcgatcagctgagcccacttgaatcatcgtctgcatcccccgaatccgcctcacctcaatcaaccgtgactgtctttcaacagacccaaattcaagaacctaccgccaatgcaactaccaccaccgctactactgacgaactgaaaactgtcactaaggaccggatggaggatatcaagattctgattgcttcgccttcacccacccatattcacaaagagactacgtccgcaacctcctccccttacagagacacccaaagccgcacggcttcgccgaatagagccggtaagggcgtgattgaacaaaccgagaagtcacatcctcggtcaccgaacgtgctgtcggtggcactgtcacagcgcactaccgtgccggaggaggaactgaaccctaagatactcgcactccaaaatgcccagaggaaacgaaagatggagcatgacggaagcctcttccaagcggtggggatagggactttgcttcaacaacccgacgaccacgcagccaccacctcgctctcgtggaagagagtgaagggttgtaagtcgtcggagcagaatggcatggaacagaaaaccattatcctcattccaagcgatttggcgtgtaggctgcttggacagagcatggacgaatcggggctgccccaactcacgtcctacgactgtgaagtgaacgcacctattcaaggctcacgaaacctcctccagggcgaagagctgcttcgggcgctggaccaggttaac

SEQ ID NO: 33109 - DNA, 2478 bp, synthetic construct
  misc_feature 1..2478: note = Description of Artificial Sequence: Synthetic coding sequence
  source 1..2478: mol_type = other DNA
atggaaggtgcaggaggtgcaaatgataagaagaagatctcgagcgaaagaagaaaagaaaagtcgagagacgcagctagatcgaggcggtcgaaggaatccgaagtgttctacgaactggcccatcaactgccccttccccacaatgtgagcagccatcttgataaagcgtcggtgatgagactgactattagctaccttagagtccgaaagttgcttgacgccggtgatctcgacatagaggacgacatgaaggcacagatgaactgcttttatctgaaggcccttgacggatttgtgatggtgctcactgacgacggcgacatgatttacatttcggacaatgtcaacaaatacatgggcctcactcagtttgagcttaccggacactccgtgtttgatttcactcatccctgcgaccacgaggagatgagggagatgctcacccatcgcaacggactcgtcaagaaggggaaggaacaaaacacccaaaggtccttcttccttcgcatgaagtgtactctcacctcgcgcgggcggaccatgaacattaagagcgcgacttggaaggtgctgcattgtactggtcacattcatgtgtacgacaccaattcgaatcaacctcaatgcggatacaaaaagccaccaatgacttgcctcgtgcttatatgcgaaccaattccacatccatcgaacattgagattccgctcgattccaagacgtttctgtcacggcattcgctcgatatgaagttttcatactgtgatgaaaggattactgaactcatgggctacgagccagaggaattgctgggcagatccatttacgaatactaccacgcattggatagcgatcatcttactaaaacgcatcatgacatgttcaccaagggtcaagtgaccaccggacaatacagaatgctcgcgaagcggggaggatatgtctgggtggaaacccaggcaactgtgatttacaacactaagaattcccagccccaatgtatcgtgtgtgtcaactatgtggtgtcgggcattattcagcatgaccttatcttctcactgcaacagactgaatgtgtgctgaagcctgtcgaatcgagcgacatgaaaatgactcagctttttactaaggtggagagcgaagatacctcaagcctctttgataagctcaagaaggagcctgacgcattgaccctcctcgcccctgcagcgggggataccatcatatcattggattttggaagcaacgatacggaaaccgacgaccagcagctggaagaagtccctctttacaacgatgtcatgctgccgtcgcctaacgaaaaactgcaaaacattaacctcgctatgtcgccactgcccactgcagaaactccgaagcccctgagatcgagcgccgatcctgcccttaaccaggaggtggccctgaagctggagccaaaccctgaatcccttgaactcagctttaccatgccacaaattcaggaccagaccccttcgccctcggatgggtcaacccgacaatcctcccctgaacctaacagcccgtcagaatattgtttttacgtggactctgatatggtgaatgagttcaagttggaactggtcgagaaacttttcgccgaagataccgaagctaagaaccccttctctacccaagataccgatcttgatttggagatgctggcaccttacataccaatggatgatgattttcagttgcggagcttcgatcagctgtcgccactcgagtcatcctcggcttcgcctgagtcggcatccccacaatcgacggttaccgtgtttcaacagactcagatccaggaacctactgcaaacgcaactaccaccaccgcgactacggatgagctcaaaactgtcactaaggatcgcatggaggatatcaaaattcttatcgcctccccttcgccgacgcatatccataaggaaaccacctccgcaacttcgtctccttaccgggatactcaatccaggaccgcatccccgaatcgtgcaggcaagggcgtgattgagcaaactgaaaagagccacccccggagcccaaatgtgctctcggtcgccctttcgcagcggaccactgtcccggaggaagagttgaatcctaagatacttgcattgcaaaatgcacagcgaaaacgcaagatggaacatgatggctcactgtttcaagcagtgggaattggaactctgctccagcaaccggacgaccacgcagcaacgacctcactctcatggaagagagtgaagggatgtaagtcctcagaacaaaatggcatggaacagaaaacgatcattttgattccttcggacctggcctgtcgtctcctgggtcaatcgatggatgaatccgggcttccacagctgacctcgtacgattgtgaggttaatgcccctatccagggaagcagaaacttgcttcagggggaagaacttcttagagccctcgatcaggtgaat

SEQ ID NO: 33110 - DNA, 2478 bp, synthetic construct
  misc_feature 1..2478: note = Description of Artificial Sequence: Synthetic coding sequence
  source 1..2478: mol_type = other DNA
atggaaggtgccgggggagcgaacgataagaagaagatctcatccgaacgtagaaaggaaaagtcccgcgatgccgcacgctccagaagaagcaaggaatccgaggtgttctatgagctcgcccatcaactcccgcttccacataatgtgtcgtcgcaccttgacaaagcgtcagtgatgagactgactatctcatacttgagggtgcggaagctccttgatgccggagatctggatatcgaggatgatatgaaggcccagatgaactgcttctatcttaaggcactggatggcttcgtgatggtgcttactgacgacggcgatatgatctacatttccgacaacgtcaacaagtacatgggtctgacccagtttgagctgaccggacactccgtctttgattttacccacccttgcgatcatgaagaaatgcgcgaaatgctcactcatcgcaatgggttggtgaagaagggaaaagaacaaaacactcaaagatccttttttctgcgcatgaaatgtactctgacctcaagaggaagaaccatgaacattaagtcggcaacgtggaaggtgctccattgtaccggacacatacatgtgtacgacactaactccaaccagccacaatgcggttacaagaagcctcccatgacctgcctggtgctgatctgcgaacctatcccgcacccatcaaacatcgaaatcccgcttgattcaaagacctttctctcaaggcattctcttgatatgaagttttcctactgtgatgagcgcatcactgaacttatgggttacgagccagaagaacttctgggacgttcaatctacgagtactaccatgcactcgactctgatcaccttactaaaactcatcatgacatgttcactaagggtcaagtcaccaccggccaatacaggatgctcgcaaagcgaggaggttacgtctgggtggagactcaggccactgtcatctacaacaccaaaaacagccaaccccaatgcatcgtgtgcgtgaattatgtggtgagcggaattatccaacacgacttgatctttagcctgcagcagaccgaatgtgtcctcaaaccagtggagtcatccgacatgaagatgactcaactgtttacgaaagtggagtccgaagatacctcgagcctgtttgacaaacttaagaaagagcccgacgcccttacgctccttgctccagcagccggggatacgatcatttcgctggatttcggcagcaatgacaccgaaaccgatgaccagcagttggaggaggtccctctttacaacgatgtcatgcttccctcaccaaacgaaaagctccaaaacattaatctggcgatgtctccactgccaacggccgagacgcctaaaccattgcgatcctcggcagaccccgccctcaatcaagaagttgcgctgaagttggagccaaacccagaatcccttgaactcagcttcaccatgccacagatccaagatcaaaccccaagcccaagcgatgggtctacccggcaatcgtcccccgaaccaaactcgccctcggaatactgtttctacgtcgactccgacatggtgaatgagttcaagctggagctggtcgagaaactttttgcagaagataccgaagccaaaaacccttttagcacgcaggataccgatcttgaccttgaaatgctggctccgtacatacctatggatgatgatttccaattgcggagcttcgatcagctgtcgcccctggaatcgagctccgcaagccccgagtcggcaagcccgcaaagcactgtgaccgtctttcagcaaactcagatccaagagccaaccgcgaatgcgaccacgacgactgcaactactgatgaactgaaaaccgtgactaaggataggatggaggatatcaaaattcttattgcctcccctagcccaactcacatccacaaggaaaccacttccgccacctcatccccgtacagagacacccaaagcagaacggcatcgcccaacagagccggaaagggagtgattgaacagacggagaaaagccatcctcgaagcccaaacgtgctctccgttgcactctcacaacggaccaccgtgccggaagaagaactgaaccctaagatactggcactgcagaatgcccaacggaaaagaaagatggaacatgacggctctctctttcaagccgtgggaattggtaccctgcttcagcaaccagacgatcatgcagcgaccacttcgctttcgtggaagcgcgtcaagggttgcaagtcgtccgagcaaaatggaatggagcaaaagaccataattcttattccttcagatcttgcatgtagactgctcggtcagagcatggatgaatcggggctgcctcaactgaccagctacgattgtgaagtgaacgctcctattcaggggagccggaacctgctgcaaggagaggaactcttgagggcactcgatcaggtgaat

SEQ ID NO: 33111 - DNA, 2478 bp, synthetic construct
  misc_feature 1..2478: note = Description of Artificial Sequence: Synthetic coding sequence
  source 1..2478: mol_type = other DNA
atggaaggcgccggaggagcaaacgacaaaaagaagatctcatcagaaaggaggaaggagaagtcgcgcgatgcggcccgatcccgccgaagcaaggaaagcgaggtgttttatgagctggcacatcagcttcctctgccacataacgtgtccagccatctcgataaggcctcggtgatgcgattgactatatcgtacctgcgagtgcgaaagctgcttgatgcgggggacctggatattgaggacgatatgaaggcccagatgaattgtttttacctgaaggctctcgatggttttgtgatggtccttaccgatgatggggatatgatttacatttcggataacgtgaataagtacatgggattgacccaatttgaactcacgggccatagcgtgtttgattttactcacccttgtgatcacgaagaaatgcgggagatgcttactcatagaaacggactggtgaagaagggtaaggaacaaaacactcaaagatcgtttttccttcggatgaagtgcaccctgacttcaagaggaaggaccatgaacataaagtcagcaacctggaaggtgctgcactgtacgggacatatccatgtttacgatactaactcaaaccagccccaatgtgggtacaaaaagcctcctatgacttgcctggtgctcatttgtgaacctattccgcacccctcgaacatagaaattcctctcgactcaaagactttcctctcccggcattccctggacatgaagttttcctactgcgacgaacgcataactgagcttatgggatacgagccagaagaactgctggggaggtctatctacgagtactaccatgcgctcgactctgaccatctgaccaagactcatcatgatatgtttaccaagggacaggtcactactggacagtacaggatgctggcaaagcgcggaggatacgtgtgggtggaaacccaagccaccgtgatttacaatacgaagaatagccagccacagtgtattgtgtgcgtgaattacgtggtgtccggtatcattcagcatgatctgatctttagcctgcagcaaaccgaatgtgtcctgaaacccgtcgaatcgtccgacatgaagatgacgcagctgtttactaaagtcgagtccgaagatacttcgtcgctttttgataaacttaagaaggaaccagacgcacttactcttctggcgcctgcagctggtgatacgataatctcccttgattttggatcgaatgataccgaaaccgatgaccagcaactggaagaggtgccactttacaacgatgtgatgctgccatcgcctaacgaaaaactgcagaacattaatcttgcaatgtcgcccctgccaaccgcggaaaccccgaagccacttcgctccagcgcagaccctgcgctgaaccaagaggtcgcactcaagctcgaacctaaccctgagtcgcttgaactttcatttacgatgccacagatccaggatcaaactccgtcgccttccgacggatccactagacaatcgtcgcccgaacccaattcaccaagcgaatactgtttttacgtggattctgatatggtcaacgaattcaagctggagttggtcgaaaaacttttcgccgaagatactgaagccaaaaacccattcagcactcaagacaccgatttggacctggaaatgcttgcaccttacatccctatggatgacgatttccaactccggagctttgatcaactttcgccacttgaatcatcgagcgcatcaccagaatccgcctcgccccagtcgactgtgacggtttttcaacagacccagattcaagaaccaacggcaaacgcaaccaccaccactgcaactactgatgagctgaaaaccgtgaccaaggaccgcatggaagatatcaagattctcatagcctcgccatccccaactcacattcataaggaaacgacttcagcaacctcgtcgccttacagagatactcagtcgaggaccgcatcgcctaaccgggcaggaaagggcgttatagaacagactgagaagtcgcaccccagatcacctaatgtgctttccgtcgccttgtcccagcgcactaccgtgcccgaagaagaattgaacccaaagatcctcgcacttcaaaacgcacaaaggaaaaggaaaatggaacacgatggatcgttgtttcaggcagtcggtatcggaaccctcctgcaacaaccagatgatcatgcggcaactacctcgctgtcatggaaacgggttaaaggttgtaagtcatctgaacagaatggaatggaacaaaagaccataattctgatcccctccgatctggcgtgcagactcctcggacaatccatggatgaatccggcctgccacaacttacttcatacgactgtgaagtcaacgcccctattcagggctcacgaaaccttctccaaggtgaagagctgcttagagccttggaccaggtgaac

SEQ ID NO: 33112 - DNA, 2478 bp, synthetic construct
  misc_feature 1..2478: note = Description of Artificial Sequence: Synthetic coding sequence
  source 1..2478: mol_type = other DNA
atggagggggcgggtggggcgaatgataaaaaaaagatttcctctgaaagaagaaaggagaaatcccgggacgccgctcggtccaggaggtccaaagagtcagaagtcttttatgaactggcccatcagctccctttgcctcacaatgtcagttcccacttagacaaagcgtcagtgatgcgactaactataagttatctgagagtcagaaagctattggacgctggtgacttggacatcgaggacgatatgaaggcccagatgaattgtttttacctgaaggccttggatggctttgtcatggttcttaccgacgacggcgacatgatctacatctctgataacgttaataagtacatggggctaacccagttcgaactgaccggccattcagtattcgatttcactcacccctgcgaccatgaagaaatgcgggaaatgctgactcataggaatggcttggtcaaaaagggcaaggagcagaacacccagagatcgttcttcctgcgaatgaaatgtaccttgacaagccgcggcaggacaatgaatataaaaagtgcaacgtggaaagtcctgcattgtacagggcatatccacgtttacgatacgaactcgaatcagccccagtgcggatacaaaaaaccccctatgacgtgcctggtcttgatctgcgagccaataccccacccgtccaatatcgaaatcccgcttgattccaaaacctttctttcccgccactccttggatatgaagttctcgtactgtgacgagagaatcacagagctgatgggttacgaacccgaggaactgctcgggcggagcatatacgagtactatcacgccctagactcagaccacttgactaagactcatcatgacatgttcacaaagggccaggtgaccaccggacagtatcgcatgttggcaaaacgtgggggctacgtgtgggtggagactcaggccaccgtgatttacaacacgaagaattcccagccgcagtgcattgtatgcgtgaactacgtggtttctgggattatccaacacgacctgatcttttccctccagcagactgaatgcgtgctgaagcccgtggagtcttcagacatgaaaatgacacaattgtttactaaagtggagagcgaagacacgtcttccctgtttgataaacttaagaaagaaccagatgccctgacgcttctcgctcctgccgctggggacacaattataagcctggactttggttccaatgacactgagaccgatgaccagcagctggaagaggtccccctgtacaatgatgtgatgctgcctagtcctaacgagaaactgcagaacatcaatctggccatgagtccgctgcccaccgcagagactccaaagccccttagaagttccgccgatcctgcactgaatcaggaggtggctctgaagttagaacccaacccggaaagtctagagctctcattcacaatgccccagatacaggaccagacaccctcacccagtgacgggagtacccggcaatcaagtccagagcctaatagcccctcagagtactgtttctacgtggattccgatatggtgaacgagtttaaattagagctggtggaaaagctgtttgctgaggacacagaggcaaaaaatcctttttccacacaggatacggatttggacctggaaatgctggctccatacatccccatggatgatgatttccagttaagaagtttcgatcagctgtcgccgctagagagttcgagcgcgagccccgagtccgcatccccccagagcactgtgaccgtgttccagcagacacagattcaggaaccaaccgccaacgcaaccactacaacggcaaccactgatgaactgaaaaccgtgacgaaggaccgcatggaagacattaagatcctgattgcatctccatcccctacgcacatacacaaagagaccaccagcgcgacctccagtccctatcgcgacacccagtccaggacagcctcgccgaacagagcgggaaagggagtgattgagcaaactgaaaagagccatcctcgaagccccaatgttctgagtgtggcgctgtctcagaggactaccgtccccgaagaggagctgaacccaaaaatcctcgctctgcagaacgcacagcgcaagcggaagatggaacatgatggctcccttttccaggcggtaggcatagggacgctgctgcagcagccggacgatcatgctgctaccacctcacttagttggaagagggtaaaaggttgtaagtctagcgaacagaatggaatggagcaaaagactatcatcctgatccccagcgatctcgcctgccggttgcttggccagagcatggacgaaagcggactccctcagttaacctcatacgattgtgaagttaacgctcccattcagggcagcagaaatctgttacagggggaagagttgcttagggctctcgaccaggttaat

SEQ ID NO: 33113 - DNA, 2478 bp, synthetic construct
  misc_feature 1..2478: note = Description of Artificial Sequence: Synthetic coding sequence
  source 1..2478: mol_type = other DNA
atggagggagctggaggcgcaaacgataagaaaaagatctcaagcgagcgtagaaaagagaaatccagggatgcagccagatcacgtcgttctaaagagagcgaggtgttttacgaactagctcaccaactgccactgcctcacaatgtcagtagccatctggacaaagcctctgtcatgcgtcttaccatcagttacctcagggtccgtaaactattggatgcaggggatctggatatcgaagatgacatgaaagcccaaatgaactgtttttatctcaaagccctcgatggtttcgtcatggtgctcactgatgatggcgacatgatctatatctccgataacgtgaataaatatatgggactcacccaattcgagctaacaggccattctgtcttcgatttcactcatccctgcgaccacgaggagatgagggagatgcttactcaccggaacggcctggtcaagaaggggaaggaacagaacactcagcgaagtttcttccttagaatgaagtgtacactcaccagtcgcggacgcactatgaacataaagtcagctacctggaaggtcctgcactgcacaggacatatacacgtatatgatacgaactccaatcagcctcagtgtgggtacaaaaaaccacccatgacatgcctggtgctaatctgcgaacccatcccacaccctagcaacatagagatcccactggattcaaagacattcctgtctaggcacagcttggacatgaaattctcttactgcgatgaaagaataacagaactcatggggtatgaaccagaagagctcctcggacgttctatctatgagtactaccatgcgctggactccgaccaccttaccaagacccaccatgacatgtttacgaaaggtcaggttacaacaggacaatatcgaatgctggcgaagcggggaggctacgtgtgggtcgaaacccaggccaccgttatctacaacactaagaattctcagccacagtgtatcgtgtgtgtgaactacgtggtgtctgggatcatccagcacgatctcatattctctttgcagcagactgaatgcgtgctgaagcccgtggagtctagcgatatgaaaatgacccagctcttcactaaggtggaatcagaggatacgagctcactgtttgacaagctgaagaaggagcctgacgccctcaccctgctggcacctgccgccggggatactatcatctcactggacttcggatcaaacgataccgaaaccgatgatcagcagttggaggaggtcccactttacaatgatgtcatgcttcccagtcccaatgaaaagctgcagaatatcaatctggctatgtcacccctccccactgctgagaccccaaaaccactacgttcttcagctgaccccgctcttaaccaggaagtcgccttaaagttggagcccaatccagaatccctagagctaagctttactatgcctcagattcaggatcaaacaccgagcccatcagacggtagtacacgccagtcctctccagagcctaattctccttcagagtactgcttttacgtggatagtgacatggtgaatgaattcaaattggagttggtggagaagctcttcgcagaggacacggaggccaaaaatccgttcagcacacaagacaccgaccttgatcttgaaatgcttgctccctatatcccaatggatgatgattttcagctgcgaagtttcgaccagttatctccattagaaagcagctctgcctctcctgagtctgctagtccgcaatctacagtgaccgtcttccagcaaacacagatacaagaaccaactgcaaatgcgacaacgactaccgccaccactgacgagctgaagacagtgactaaggacaggatggaggatattaaaatcctgatagcttctcctagccctacccatatacacaaagagacaacatccgccacatcttcgccttacagggatacgcagtctcgcactgcatcacccaacagagccggcaaaggagtcattgaacaaaccgagaagagtcacccccgatccccgaatgtactctccgttgccctgagtcagagaaccacagtgcctgaggaggagttaaatcccaagatcttagctctacagaatgcgcagcggaaacgaaagatggagcacgacggatcactgttccaggcggtaggtatcggcacactcctgcagcaacccgacgaccacgcagccactacctccctgtcatggaaacgcgtcaaagggtgtaagtccagcgaacaaaacggtatggaacagaagacgatcatcctgatccccagcgatttggcctgtagactgctgggccagagcatggacgagagtgggctcccccaattaacaagttatgattgcgaggtgaatgcccctattcaaggaagtcgcaacctgctccaaggcgaggagcttttacgagcactggaccaagtgaat

SEQ ID NO: 33114 - DNA, 2478 bp, synthetic construct
  misc_feature 1..2478: note = Description of Artificial Sequence: Synthetic coding sequence
  source 1..2478: mol_type = other DNA
atggagggagcaggtggagccaatgacaagaaaaagatatcgtccgaaagacgtaaagagaagtcaagggatgcagcccgctcgagacgttccaaagagtcggaagtgttttacgagctggcacatcagcttcctcttcctcacaacgtgagctctcatctggataaggcatcagtcatgcgacttaccatttcgtacctgcgggtgcggaagttgctggacgctggagatctggacattgaggatgatatgaaggcccagatgaactgtttctacctgaaggcacttgatgggtttgtcatggtgctgacggatgacggcgatatgatctacatttcggataacgtgaacaaatacatgggcctcacgcagtttgaacttaccggacattccgtgtttgattttactcatccttgcgatcatgaagaaatgcgggagatgctgacccaccgcaatggtctggtgaagaaagggaaggagcaaaacacccaaagatccttctttctgcgcatgaagtgtactctgacctctcgaggccggactatgaacattaagagcgcaacttggaaggtgttgcattgtaccggtcatatacacgtctatgatacgaactcgaaccagccacaatgtggatacaagaaacctccaatgacctgtctggtgctgatttgcgaaccgattcctcacccttccaacattgaaattcctctcgacagcaaaacctttctttccaggcattccctggacatgaagttttcttactgcgacgagcgtatcactgagctgatgggctacgagccagaagaactcctgggacggtcgatttacgaatactaccacgcccttgattccgaccatctcaccaaaacgcatcatgatatgttcactaagggtcaggtgactactggtcagtaccgtatgcttgcaaaaagagggggctacgtgtgggtcgaaactcaagcaaccgtgatctataacactaagaatagccaacctcaatgcatcgtctgtgtcaactacgtggtgtcggggattatacagcatgatctcattttcagcctccaacagaccgaatgtgtgctcaagcccgtggaaagctcggacatgaagatgacccagctgttcaccaaggtggagagcgaagataccagctcgctgtttgacaaactgaagaaagaacctgacgcccttacgctccttgccccagccgcaggtgataccatcatctctctggattttggatccaacgacaccgaaactgacgatcagcagctcgaggaagtgccgctttacaatgacgtcatgcttccatcgcctaacgaaaaactgcagaacatcaatctggcgatgtcaccactgcctactgcagaaaccccaaagccacttcgctccagcgcggatcctgcactcaaccaagaggtggccctgaaactggaaccaaacccagaatcgcttgaactcagttttaccatgccgcagatccaagatcaaactccctcccccagcgatgggagcacccggcagtcaagccccgagccaaactccccgtcggagtactgcttctacgtggattccgatatggtgaatgagtttaagctcgaactggtcgaaaagctgttcgcagaggacaccgaagcgaagaacccgttttcgactcaggatactgacctcgatctggaaatgctggcaccttacatccctatggacgacgatttccagcttaggtcattcgaccagctttcgccgcttgagtcatcctccgcctccccagaatccgcctcgccccaatccaccgtcactgtttttcagcagacccaaatccaagagcctacggcaaatgcaactacgactactgcaaccaccgatgaattgaaaaccgtcaccaaggatagaatggaggacatcaaaattctgatcgcatcgccttcgcccacgcatattcataaggaaaccacttccgcaacttcgtccccttacagagatacccagtcgagaaccgcatcgccaaatagagcgggcaagggagtgattgagcagaccgaaaaaagccaccctcgttcgcctaacgtcctttcagtggcactttcccagagaactaccgtgcctgaggaggagcttaacccaaagattcttgccctgcaaaatgcacagagaaagcgtaaaatggagcatgacggatcgctctttcaagcagttggtattggtacccttcttcagcaaccagacgatcatgctgcaaccacttcactttcatggaagcgggtgaagggctgtaagtcgagcgagcagaatggaatggaacaaaaaaccattattcttataccttccgatcttgcttgccgactcctgggacagtccatggacgagtcaggccttccacaattgacctcctacgattgtgaagtgaacgcaccaattcagggttccagaaatctgctgcaaggggaagaactgctgagagcactcgaccaagtcaat

SEQ ID NO: 33115 - DNA, 2478 bp, synthetic construct
  misc_feature 1..2478: note = Description of Artificial Sequence: Synthetic coding sequence
  source 1..2478: mol_type = other DNA
atggaaggggctgggggggcgaatgataagaaaaagataagttctgaacgaaggaaagaaaaatcacgggatgcagccagatccagaagatcaaaagagagtgaagtattttacgagctggctcaccagcttcccctacctcataatgtgtcctcccacttagacaaggcatctgtgatgagacttacaatatcttaccttcgggtgagaaaactattagacgctggagacctggacatagaggacgacatgaaggcccagatgaactgtttctatttaaaggcactggatgggtttgttatggtcctcactgatgacggggatatgatctacatatctgataatgtgaacaaatatatgggactaactcagttcgaactcacggggcattctgtttttgactttactcacccatgtgatcatgaagaaatgcgggaaatgctaactcatcgcaacgggcttgtgaaaaagggaaaagaacagaatactcaaagatcgttttttctgcggatgaaatgtacactgacttctagggggcggactatgaatatcaaatctgccacatggaaagtccttcactgcactgggcatatccacgtctacgatactaactcaaatcagccccagtgtggatataaaaaaccacctatgacttgtctcgtcctaatctgtgaacctatcccccatccatcaaacattgaaataccccttgattccaaaacttttctgtccagacacagtcttgatatgaaattctcctactgcgatgaacggatcactgagctcatggggtatgagccagaagaactattagggaggtctatttatgagtattaccatgccctagactctgatcatcttacaaaaacacatcatgatatgttcacaaaagggcaggtaacaacaggacaatatagaatgcttgctaaacggggaggatatgtgtgggttgaaactcaagcaacagtgatctataatactaagaactcacagccccagtgtattgtatgtgtgaattatgttgtgagtggaatcattcagcatgatttaatatttagtctccagcagactgagtgcgtgttaaaacctgttgaatcttctgatatgaaaatgacacaattgtttacaaaagtggagagtgaagacacaagttccctcttcgataaattaaagaaagagcccgacgcactcacactgctagctcctgccgccggggacactatcatttccctggatttcggaagtaatgatacagaaactgatgatcagcagctcgaagaggtccctctttataacgacgtgatgctgccctctccaaatgaaaaactccagaacatcaatttggcaatgtcacctctgccaacagccgaaacacccaaacccctaagatcaagtgccgatcctgctctgaaccaggaagtagctctcaaattagaaccaaatccagaatcattggaactctcttttacaatgcctcagatacaggaccagacacccagtcctagtgatggatcaacacgccaatcaagtccagaacctaactccccctccgaatattgtttctacgtggattctgatatggtcaacgaatttaaacttgaattagtagaaaaactatttgccgaggatacagaagcaaagaatcctttctctactcaggatacagatcttgatcttgaaatgctggccccctatatccccatggatgatgattttcagctgcggtctttcgatcagctgtctccccttgaatcatcatcagcatcccccgaatctgcaagtccacagtctacagtgactgtatttcagcagacacagatccaggaacccactgccaatgccacaactacaactgcaacaacagatgaactcaaaacagtaactaaagacaggatggaggatatcaagattctaatagcttctccaagtcccacacacatacataaagagactacttctgccactagtagtccctatagggatacacagtcaagaacagcctctccaaacagggctggaaaaggggttatcgaacaaacagagaagtctcatcctcggtccccaaacgttttgtcggtcgcccttagtcagagaacaactgtgcccgaggaggaacttaatcctaagatccttgccctccagaatgcacagcgaaaaagaaaaatggaacatgatggatccctcttccaagctgtggggatcgggacgcttcttcaacagccggatgatcacgcagctacaacaagtctctcctggaaacgagtgaaaggatgtaaatcttctgaacagaatggaatggagcagaaaacgatcatactcatcccttccgatctggcttgtaggctactcgggcagtccatggatgaatctgggttgcctcagctcacatcctatgattgtgaagtgaacgcaccaatccaggggtctcggaatcttctgcagggggaagaactgttacgggctctggaccaggtgaac

SEQ ID NO: 33116 - DNA, 2478 bp, synthetic construct
  misc_feature 1..2478: note = Description of Artificial Sequence: Synthetic coding sequence
  source 1..2478: mol_type = other DNA
atggaaggcgctggcggggccaacgataaaaagaaaatttcatccgagcgcaggaaagagaaatcaagagatgccgcaagatcaagaaggagcaaagagagtgaggtattttacgagctggcacatcagctgccactgcctcataatgtttcttcccatctggataaagcaagcgtcatgcggctgactatttcatatcttcgagttcgcaagctgctggacgcgggcgaccttgatatcgaggatgacatgaaagctcagatgaactgcttttatctcaaagcgctggatggtttcgtgatggtcttgacagacgatggggacatgatttacataagcgacaacgttaataagtatatgggattgacacagttcgagctgacaggacacagtgttttcgactttacacacccatgtgatcatgaagaaatgcgggaaatgttgacccatagaaatggactggtgaagaaaggaaaggaacagaacacccaacgaagctttttcctccgaatgaaatgtaccctgacgagccgaggaagaacaatgaacataaaaagcgccacatggaaggtgttgcactgtactggacatatacacgtctatgacacaaatagcaaccagccacaatgtggctataagaaaccaccaatgacttgtttggttctaatctgtgaacctattccccacccctcaaacatcgagatccccctcgatagcaaaacattcttgagtcgtcattccttggacatgaagttttcctactgtgatgaaagaataactgagcttatggggtacgagcccgaggagctgcttgggcgaagcatttacgagtactaccacgctttggactccgatcacctcacaaagacacaccatgatatgttcacaaagggtcaggtcacgaccggacagtatcggatgctggcgaagcgcgggggctatgtgtgggtggaaacccaagccacggtgatctataacaccaagaattctcagccccagtgtattgtttgtgtgaattacgtggtaagcggaatcattcagcacgatcttattttctctctccaacagacggagtgcgttctgaaacccgtggagagctctgacatgaagatgactcaactgttcactaaggtggagagtgaggacacatcctccttatttgataagttaaagaaagaacctgatgcactcacactgctggcgcccgcagcaggagataccatcatatctctggattttggctctaacgacactgaaactgacgaccagcagctcgaggaggtgcccttgtataacgacgtcatgctgccttcacccaatgagaagctgcaaaatatcaatttggccatgtctcccctacccactgcagagactccaaaacccctccggagcagcgccgatccagcacttaaccaagaggttgctcttaagctggaacctaaccccgagagtcttgaactcagctttacaatgccacagatccaggaccagactccatccccttccgatgggagcacgcgacagtcctctccggaacccaactctccttccgaatattgcttctacgtcgactctgacatggtgaatgaattcaaactggaattggtggaaaagttattcgccgaggacaccgaagcgaaaaatcctttttcaacgcaggacactgacttggacctagagatgctggcgccctatatccccatggatgatgactttcagcttcgcagctttgatcaactcagccccttggagtcctcctcagcatcgcccgagtcggctagtcctcaatccaccgtgacggtgttccagcaaacccagattcaggagcccaccgctaacgccaccactacgacagctacaactgatgaactcaagactgtcactaaggataggatggaggacattaagattctgattgccagcccctcgccaacccacatccacaaggagacgacatctgccacaagctccccctacagggatacccagtccaggacagcctcccccaatcgagccggaaagggggtgatcgagcagacagagaaatcgcatcccagatcccctaacgttctgtctgttgcactgtcacaaagaacaacagtgcccgaggaagagctgaatcctaaaatcctagcgctccagaacgctcaaaggaagcgaaaaatggagcatgatggcagcctgttccaggccgtcggcatagggaccctgctgcagcagccggatgatcacgctgctacgacatctctttcctggaaacgagtaaaggggtgtaaaagttcagagcaaaatggtatggaacaaaagaccataatcctcattccctccgacctggcatgtaggctcctcggccagtccatggatgagtccgggttaccccagctcacctcttatgattgcgaggttaacgctccaatccaggggtctagaaacctcttacagggcgaggagctcctgagagccctggatcaggtgaac

SEQ ID NO: 33117 - DNA, 2478 bp, synthetic construct
  misc_feature 1..2478: note = Description of Artificial Sequence: Synthetic coding sequence
  source 1..2478: mol_type = other DNA
atggagggagctggaggtgccaacgacaagaagaagatctccagcgaacggcgaaaagagaagagtcgcgatgccgcccggtcgcgtcgatccaaagagtccgaggtcttttacgaactggcccaccagcttcctctccctcacaacgtgtctagccatctcgataaagctagcgtgatgaggctgacaatttcctacttgcgggtgagaaaactcttagatgccggcgacttggatattgaagacgacatgaaagcccagatgaattgtttttatctgaaggccctggatggcttcgtgatggtgctaacagacgacggagacatgatctatatctcagataacgtgaacaagtatatggggttgacacagtttgagctgaccgggcactctgtctttgactttacccatccctgtgaccacgaagaaatgcgcgaaatgctgacgcatcggaacgggttggtgaaaaaaggcaaggagcaaaacactcaacgttcatttttcctgagaatgaaatgtacattgacttcaagaggtaggacgatgaatataaaatcagcgacgtggaaggtgctccactgcacgggacacatccacgtttacgacaccaatagcaaccagccccagtgcggatacaaaaagccaccaatgacatgtctggtcctgatttgtgaaccaatcccacatcctagtaacatcgagattccattagatagtaagacattcctaagcaggcacagtctcgacatgaagttttcctactgtgatgagcggataaccgagctgatgggctacgagcccgaggagctgctgggtcggtctatctatgagtattatcacgctttggacagcgaccatctgactaaaacccatcacgatatgttcaccaaaggccaggtgaccacaggacagtatcggatgttagccaagcgaggcggctatgtgtgggtggagacccaggccaccgtgatttacaacaccaaaaatagtcagcctcagtgcatcgtctgtgtgaactacgtggtcagtggcatcattcaacacgatctgatcttctcactccagcaaacagaatgtgttctgaagcccgttgaaagctctgacatgaagatgacccagctttttaccaaggtcgagagcgaggacacttccagcttatttgataagcttaaaaaagaacccgatgcgttgacgctcctcgcacccgctgccggggacaccattatttctcttgactttggctccaatgataccgaaactgacgaccagcagctggaagaggttcccctgtacaacgatgtaatgctgcctagccccaatgagaagctgcagaacatcaacttagccatgagtccactgcctaccgctgaaacacctaaaccactgaggtcctctgcagaccccgccttaaaccaggaggtcgcgctgaaacttgaaccgaatcccgagagcctggagctatcctttactatgcctcaaattcaggaccagacgccctcgccttctgacgggagcaccaggcagtccagcccggagccaaatagccctagtgaatactgtttctatgtcgactctgacatggtaaacgagtttaaacttgagctcgtcgagaagctcttcgctgaggatactgaagccaagaaccctttttccactcaggataccgacctggacctggaaatgctggccccctacattccaatggacgacgatttccaactccgctcattcgatcaactatctcccctcgagtcctcctccgcctccccagaaagcgctagcccacagagcaccgttaccgtgttccaacagacacagatccaagagccaaccgcaaatgcgaccaccaccaccgctaccacagacgagctgaaaactgtaacaaaggacagaatggaggacattaaaatacttatcgcgagtccaagcccaacccacattcacaaggaaaccacatccgcgaccagctcgccttaccgtgacactcagtctcgcactgcatcccctaacagagcaggcaaaggcgtgatagaacagactgagaagtctcacccgcgcagtcccaacgtcctaagtgttgctttgtcccagcggaccacggtgcccgaggaggagctgaatccaaagattctggcccttcaaaatgctcagcgcaagaggaaaatggagcacgatggttccctattccaggccgtgggtatcggtactctcctgcaacaaccagacgaccatgcagctacgacctctttgagctggaaaagggttaagggatgcaaaagttccgaacaaaatggtatggagcagaagacaataattttgatccccagcgacctcgcttgcagactgctgggccagagcatggacgaatccggcctcccccaactgacgtcctatgactgcgaggtgaatgcccctattcaaggtagcagaaacctcctgcagggtgaggagctactgcgagcgctggaccaggtgaac

SEQ ID NO: 33118 - DNA, 2478 bp, synthetic construct
  misc_feature 1..2478: note = Description of Artificial Sequence: Synthetic coding sequence
  source 1..2478: mol_type = other DNA
atggaaggcgctgggggtgctaacgataaaaaaaaaatttcatcagaacgtcgaaaagaaaaatcacgggatgccgctcgatcgcgccgcagcaaggaatccgaggtattctacgagctggcacaccagcttcctcttccgcataacgtgtcttctcatttagacaaagccagtgtgatgagattaactatttcgtaccttagggtgaggaagcttctggatgccggcgatctggatatcgaagatgatatgaaagcacagatgaattgcttctatctgaaggcacttgatggtttcgtgatggtgcttacggatgatggagatatgatttatatctctgataatgtaaataaatatatgggtttaacccaattcgaactcacagggcattcagtatttgattttacacacccgtgcgaccatgaagaaatgcgcgagatgcttactcatcggaacggactcgtgaaaaaggggaaagaacagaacacgcaacgcagtttttttttgagaatgaagtgcacactgacaagcagaggacgtacaatgaatatcaaaagtgcaacatggaaggtgcttcattgtacgggacatattcacgtttacgatactaattcgaatcagccgcagtgtggctataaaaagccgccgatgacgtgccttgtgctcatctgcgaaccgataccccacccgtcaaacattgaaataccgttagactcaaaaacattcctttcgaggcattcgttggatatgaaattcagctactgcgatgagaggatcacagaactgatgggctatgaaccggaagagttacttggacggtcgatttatgaatactatcatgcattagattccgatcatctcacgaaaactcatcatgacatgtttaccaaaggccaggtcacaactggccagtataggatgttggcgaaaagaggtggttatgtgtgggtagaaacacaggctaccgtcatctataatacaaaaaactctcagccacagtgtatagtgtgtgtgaactatgttgtttctggcattatccaacatgatctgatctttagcttgcagcaaaccgaatgtgtgctgaaacctgtggagtcatctgatatgaaaatgacacaattgtttacgaaggtggaatccgaggatacgagttctctttttgacaaactgaaaaaagagcctgatgcattgacgttgttggcaccggcagcgggcgatacaatcatcagccttgactttggcagcaacgacacggagacagatgaccaacaactggaagaggtcccgttatacaatgacgttatgttgccgtccccaaacgagaagctccaaaatataaatctagcaatgagcccgcttcctacggcggagacacctaagccccttagaagttctgcagatccagcgttgaatcaagaagtcgcgctgaagttagagcccaatcctgaaagtctcgagcttagctttaccatgccccagattcaggatcaaacaccgagtccgagtgatgggtcaacccgccagtcgtctccggagcctaactcgcctagcgagtattgcttttatgtcgatagtgacatggttaatgaatttaaactggaactcgtcgaaaaattattcgctgaagatactgaggctaaaaacccgttctcgacacaggatacagatctggatcttgaaatgctggccccgtatattccaatggacgatgacttccagcttcgctctttcgatcaattaagtccattagagtcttccagtgcgagcccggagtccgcatccccgcagtcaaccgttacagtgttccagcaaacgcaaatccaagaaccgacggctaacgccactaccacgacggctacaaccgatgagttaaaaacggtgaccaaagatcgcatggaagatattaagatccttattgctagtccgagtccaacccatattcataaagaaacaacatctgcgacatctagtccgtatcgagatacgcagtcaagaacagcctctccgaacagagcaggtaaaggcgtaatcgaacaaacagaaaagtcacacccacgttcccccaatgttcttagtgttgccttatcccagcggactacagtgccagaggaagaactcaatccgaaaatacttgcgttacaaaatgcgcaacgaaaacggaagatggaacatgatggcagtctgttccaagctgtaggcattggcacgctccttcaacagcctgatgatcatgctgctacgacatctctgtcatggaaaagggttaaaggctgcaagtcatcagaacaaaacggaatggaacagaaaacaatcatcttaattcctagcgacttagcatgtcggttattaggccaatcaatggatgaatctggcttgcctcaattgacgtcctatgactgcgaagttaatgcaccgattcaaggatcacgcaatcttttacaaggagaagaattgttgcgtgcactcgaccaagtgaac

SEQ ID NO: 33119 - DNA, 2478 bp, synthetic construct
  misc_feature 1..2478: note = Description of Artificial Sequence: Synthetic coding sequence
  source 1..2478: mol_type = other DNA
atggaaggagccggtggtgctaacgacaagaagaagattagcagtgagcggcggaaagaaaaatctcgcgacgccgctcgcagccggcgcagcaaggagagcgaagtcttctacgagttggcacatcagctacccctgccccataatgtgtcatctcatttggacaaggcctcagtgatgagattgactatctcctatttgcgagttcgaaagcttctcgatgcgggagaccttgacattgaagacgatatgaaagcccagatgaactgtttctacttgaaagcattggacggcttcgtcatggtgctgacagacgacggagacatgatatatatttctgataatgttaataagtatatgggactgacacaatttgaactgacagggcattctgtgtttgattttacccacccgtgtgaccacgaggaaatgcgggagatgctaactcataggaatggattagtgaaaaagggcaaggagcagaacacccagaggtctttttttctcagaatgaagtgcacattgacaagcagaggccgcaccatgaatatcaaatcagccacctggaaagtgctccactgcaccggccacatccacgtgtacgacaccaattccaaccagccacaatgcgggtataagaagccccctatgacatgtttagtgctgatctgcgagcccatcccccacccctctaatattgagataccactagatagcaagacctttctgagtcgtcactctctcgatatgaagttctcctactgcgacgaaaggatcactgagctgatgggatatgagcccgaagagctgctcggcaggagcatctacgagtattaccacgcactcgacagcgatcacttgactaagactcaccatgacatgttcactaagggacaggtaacgacgggacaatatcgcatgcttgcaaaacggggaggctacgtgtgggtggagacccaggcaacagttatttataataccaaaaatagccaaccccagtgcatcgtttgcgtcaactatgtggtgtctgggatcatccagcatgacttgatcttcagcctgcagcagacggagtgtgtgctgaaacccgtcgagagctccgacatgaaaatgacccagctcttcactaaggtcgagagcgaggatactagctcactctttgataagcttaagaaggaaccagacgccctgactctactagccccagccgccggggacaccataatttctctcgatttcggctctaacgacacggagaccgacgaccagcagctggaggaagttccgctgtacaacgacgtcatgctaccaagtccaaacgagaaactgcagaatatcaatcttgcaatgtccccccttcccacggcagagactccgaagcctctgaggtcttccgcagacccagctttaaaccaggaagtggccttgaagcttgagcctaacccagagtccctggagctaagcttcactatgcctcagattcaagaccagactccatctccttctgatggttccacccgacaatcaagccccgagccgaactctccctctgagtattgcttctacgtcgattcggacatggtcaatgagtttaagctcgagttggtggagaagctgttcgcagaggacacagaggcaaagaacccattctctacccaggatactgacctcgacctggagatgctggctccctatatccccatggacgatgactttcaactcagaagcttcgatcaactatctcccttggagagctcttcggccagtccagagtctgctagcccgcagtctactgtaacagtctttcagcagacccagattcaggagccaacagcaaacgctaccaccaccaccgccactactgacgagttgaagactgtcactaaagataggatggaagacatcaagattcttattgccagtccgagccctacacacattcataaggagactacttcagctacgtcgtctccctaccgagacacacagtctcgcacagcaagccccaacagagctggaaagggcgttatcgagcagacagagaaatcacaccctcggtctcccaatgttctctccgtggctttgagccagcgtacgactgtgcctgaggaagaactaaatcccaaaattctcgccctgcagaacgcacagaggaagcggaagatggaacacgatgggtctctattccaggccgtggggattggaacactacttcaacaaccagacgatcacgctgctactacatctctcagttggaaaagggtgaagggctgcaaatctagtgaacagaatggcatggagcagaaaaccataatactgataccgagtgatcttgcttgccggctgctcgggcaatctatggatgaaagcggcctgccccaactgaccagctatgattgcgaggtgaatgctcccattcagggcagtcgaaacctcctccaaggagaggagttactccgggccctggaccaggtgaat

SEQ ID NO: 33120 - DNA, 2478 bp, synthetic construct
  misc_feature 1..2478: note = Description of Artificial Sequence: Synthetic coding sequence
  source 1..2478: mol_type = other DNA
atggagggagcaggtggtgctaacgacaagaagaaaatctcctcggagagacggaaggaaaagagccgggacgccgcaagatcccggcgcagcaaggaaagcgaggtgttttacgagctggcccaccagcttccactgccgcacaatgtgtcatcacacttggacaaagcatcggtgatgcggttgaccatctcctacctccgggtccgcaagctgctggatgccggagatctcgacatcgaagatgacatgaaggctcagatgaattgcttctatcttaaggccctggatggattcgtcatggtgctgaccgatgacggcgatatgatctacatctccgataacgtgaataagtacatgggattgactcagtttgaactcaccgggcacagcgtgttcgatttcacccacccatgcgatcacgaagagatgcgggagatgctgactcatcggaatggtctggtcaagaagggcaaggagcaaaatacccagaggtcattctttctccgcatgaagtgcacgctgacctctcgcggtcggacgatgaacattaagagcgccacttggaaagtcttgcattgcactgggcatatccacgtctacgacaccaacagcaaccagccgcaatgcggatacaagaagcccccgatgacctgcctcgtcctgatctgtgagccaatccctcacccgtcgaacatcgagatccctttggattcaaaaacgttcctgtctcgccacagcctcgatatgaagttcagctactgcgatgaaagaatcaccgagttgatgggatacgagcctgaggaactgctggggcgcagcatctacgagtactaccacgcactcgactcggaccatctgactaaaacccaccacgacatgtttactaagggacaggtgaccaccggacagtaccgcatgctggccaagagaggaggctacgtctgggtcgaaacccaggctaccgtgatctacaacactaaaaactctcagccacaatgcatcgtgtgcgtcaactacgtggtgtcagggatcatccaacacgatctgatcttttcattgcaacagaccgaatgtgtgctcaagccagtggaaagcagcgacatgaagatgacccaactcttcactaaagtggaatcggaggacacctcaagcctgttcgacaaacttaagaaggagccggatgcactgacgctgctggctccggcagctggcgacacgattatcagcctggacttcggttccaacgataccgaaaccgacgaccagcagctcgaggaagtgccgctgtacaatgacgtcatgcttccctcgccgaacgaaaaactgcagaatatcaacctggcgatgtcccctctgccaactgcagagactccgaagccgttgcggtccagcgcagatccagccttgaatcaggaggtggctcttaagctcgagccgaacccggaatcactggagctgtcgttcaccatgccccagatccaggaccagaccccgtcgccgagcgatggatcaacgcggcagagcagccctgaaccgaactcgccttcggaatactgtttttacgtggactcagatatggtgaacgagttcaagttggagctggtggaaaagctctttgcggaagatactgaagctaagaatcccttcagcactcaggataccgatctcgatctggaaatgcttgcgccgtacatcccgatggacgacgatttccagctgaggtccttcgaccaactgtccccgctggagtcctcttccgcgtccccggagtccgccagccctcagagcactgtgacggtgttccaacagacccaaatccaagagccgactgctaacgcaactactactaccgcaaccaccgacgaactgaaaaccgtcactaaggatcgcatggaggacatcaagatcctcatcgcctcaccgtcaccgactcacattcacaaggaaactacttccgcgacctcaagcccgtacagagacacccagtcgcggactgcatcccctaatcgcgccggaaagggagtgatagaacagaccgagaagtcacaccctcggagccctaacgtcctttcagtcgccctgtcccagcgcactactgtgccagaagaggagctgaatcctaaaatcctcgctctccagaatgcccagcggaagagaaagatggagcacgacggttcgctcttccaagcggtgggcatcggcactctgctgcaacaacctgacgaccatgcggcgaccacttcgctgtcgtggaagagagtaaagggatgcaaaagctcggagcagaacggaatggagcaaaagactattatcctgattccgtcggacctggcttgcaggctcctgggacaatcgatggacgaatccggactgccacagctgacctcctacgactgcgaggtgaacgccccgatccagggtagcaggaacctgctgcagggcgaggagctgctgcgggctcttgaccaggtgaac

SEQ ID NO: 33121 - DNA, 2478 bp, synthetic construct
  misc_feature 1..2478: note = Description of Artificial Sequence: Synthetic coding sequence
  source 1..2478: mol_type = other DNA
atggaaggggcaggcggcgctaacgacaagaaaaaaatctccagtgagagacgcaaggaaaagagccgcgatgctgccagatcccgacggagcaaggagtctgaggtgttctacgaactcgcgcatcagttgcccctgccacataatgtaagtagtcatctggacaaggccagcgtgatgagacttaccatttcatacctgagggtaagaaaattgctggatgcgggggacctggatatcgaagacgacatgaaggctcagatgaactgtttttacctcaaggccctggatggcttcgttatggttttgactgatgatggcgacatgatctacatttcagacaatgtgaataagtatatggggctgacacaatttgagctgaccggccacagcgtattcgactttacacatccatgtgaccacgaggagatgcgagagatgctgacccacaggaacggactggtgaaaaagggcaaggaacaaaacacacaaagaagctttttcctgcgcatgaagtgcactctgacttcccgggggaggacaatgaacataaagagcgccacatggaaagtgttgcactgcaccggccacattcatgtttacgacacaaactctaaccagccccagtgcggatacaagaagccaccgatgacctgccttgttcttatctgtgagccaattcctcatccgtctaacatcgaaataccactggattccaagacgttcctcagccggcattcacttgatatgaaattcagttattgcgatgaaaggatcacggaacttatgggctacgagcccgaagagctgctgggtagaagtatatatgagtactaccatgcccttgatagtgaccatctcactaagacccatcatgacatgttcacgaagggacaggtgactacggggcagtatagaatgctggccaagagaggtggttacgtgtgggttgagactcaagcaacagtgatttacaacaccaaaaacagccaaccacaatgcatcgtctgcgttaactatgtggtgtctggcattatacagcacgacctgattttctcactgcaacagacagaatgcgtgttgaaacctgtggagtcaagtgacatgaaaatgacccagctcttcaccaaggtggagagtgaggatacatcatctctgttcgataaactcaaaaaggagcctgatgccttgactctgctggcacccgccgccggagacacaatcatatccctcgatttcggctctaacgatacagagactgacgatcagcagctggaggaggtgcctctctacaatgacgtgatgctgccgagcccgaacgagaaactccaaaatattaatctcgcaatgtcccctctgcccactgcagaaacacccaaacctctgagatcatctgcggaccctgccctcaatcaggaagttgctctgaagctggaacccaaccctgaatccctggaactttcctttaccatgccccagattcaggatcagaccccctctccctctgatggctctactcgccagagttcacctgaacccaactcccccagtgaatactgtttctacgtagattctgacatggtaaatgagttcaagcttgagctggtggagaagcttttcgcggaagacaccgaggccaagaatccttttagcacccaggacactgatctggacctggagatgctggctccctacattcctatggatgatgacttccaattgaggtctttcgaccagctgagtcctctcgagtccagttcagctagccccgaatctgcctccccacaatcaaccgtcaccgtgttccaacagacccagattcaggagccaacagcaaacgccactactactaccgcaaccacagatgagcttaagacagttaccaaggatcgaatggaggacatcaaaatattgattgccagcccaagtccgacacacatccataaggagacaacttccgctacatcatcaccgtacagagacacccagagtcgcaccgccagtccaaatagggcgggaaagggagtgatcgagcaaacagaaaagagccacccacgatccccaaacgtgctcagcgtcgctctgtcccagcgaaccacagtacccgaagaggagctgaatccaaagatcctggcgctccagaatgctcaaagaaaacgcaagatggaacacgatggttcactgtttcaggcagtagggatcggcaccttgctccaacagcccgacgatcacgccgcaacaacctccctgagctggaagcgggtaaaaggttgtaagtcctcagagcagaacggtatggagcagaagaccataatcttgatcccttctgaccttgcctgtcggctgttggggcagagcatggatgagtcaggtctgccccagctgacttcctacgactgcgaagtcaacgcccctatccagggatctaggaacctgttgcaaggcgaagagctgctccgagcccttgatcaggtgaac

SEQ ID NO: 33122 - DNA, 2478 bp, synthetic construct
  misc_feature 1..2478: note = Description of Artificial Sequence: Synthetic coding sequence
  source 1..2478: mol_type = other DNA
atggaaggcgctggtggggccaatgataagaagaagatttccagcgagagacggaaggagaaaagcagagacgccgcacggtcgcggagatccaaggagagcgaagtcttttacgaactggctcatcagttgccactcccgcataatgtctcgtcccatcttgacaaagcctcggttatgcggctcaccatcagctacctgcgcgtgcgcaagctgctcgacgctggtgatctggacatcgaagatgatatgaaggcacaaatgaactgcttttacctcaaggcccttgatggtttcgtgatggtgctgaccgacgatggagacatgatctatatctcggacaacgtgaataagtacatgggactgacccagttcgaactcaccggacactcagtctttgacttcactcacccttgcgaccacgaagagatgcgggaaatgcttacgcaccggaatggactcgtgaaaaaggggaaagaacagaacactcaacggagcttttttctccggatgaagtgcactttgacttcaagaggccggaccatgaacattaagagcgcgacctggaaagtgctgcattgtaccggtcacatccatgtgtatgacactaatagcaaccagccacagtgcggatacaagaagccgcctatgacgtgcctggtcctcatttgtgaaccgattccgcacccgagcaatatcgagatacctctggacagcaagaccttcctctcgcgccactcgctcgatatgaagttcagctattgcgacgaacgaatcactgagctgatgggatacgaacccgaggaactgctcggaagatccatctacgagtattaccatgccctggactcagatcacctcactaaaactcatcatgacatgttcaccaagggtcaagtgactacgggacagtacagaatgctcgccaagcggggcggttacgtgtgggtggaaacccaggccactgtcatctacaacactaagaattcccagccgcaatgtatcgtctgcgtcaattacgttgtgagcggaatcatccagcacgatctgattttctccctccagcagactgaatgcgtgctgaagccggtggagtcgtcggacatgaaaatgacccagctgttcactaaagtggagtcggaggacacctcatccctgttcgacaagttgaagaaggaaccggacgcccttactctgctggcccctgccgcgggagacacgatcatttcgctggatttcggcagcaatgacactgaaactgatgaccaacagctcgaagaggttcctttgtacaacgatgtgatgctcccaagcccgaacgaaaaactgcagaacatcaatttggccatgagcccactcccaactgccgagactcctaaaccgctgagatcgagcgccgacccggcgttgaaccaggaagtggcactgaagctggaaccaaatccagaaagcctggagctctcattcaccatgccgcaaattcaagatcagactccttccccgtcggatggatcgactaggcaatcgtccccggaaccgaactccccgtccgaatactgcttttacgtcgactcggacatggtgaacgagttcaaactggagttggtggagaagctgttcgccgaggatactgaagccaaaaatcctttctcaacccaggacaccgacctcgatctggagatgctcgcaccatacatccccatggacgacgacttccaactgagatccttcgaccagctgagcccgcttgaatcgtcctcagctagcccggaatccgctagccctcagagcacggtcactgtctttcaacaaacgcagatccaagaacctaccgcaaatgccactactacgaccgccaccacggatgaactgaaaaccgtgactaaagatcgcatggaggacatcaagattctcatcgcctccccgtccccgacccacatccacaaggaaactacttcggctacttcctctccatacagggatactcagagccgcacggcgtctcctaaccgcgcaggaaagggcgtgatcgaacagaccgaaaagtctcaccctcggtcgccgaatgtcctgtccgtggccctgtcgcagaggactactgtgcctgaagaggagcttaatccgaagatcctggcactccaaaacgcacagcggaagcgtaagatggagcatgatggatcgctgttccaggctgtgggtatcggaaccctgttgcaacaaccagacgatcatgccgcaacgacttcccttagctggaaaagagtgaaaggttgcaagtcgtcagaacaaaatggcatggagcaaaagactatcatcctgatcccatccgatctcgcctgtaggctgctgggacagagtatggacgaaagcggacttccacagctgacttcctacgactgcgaagtgaacgccccaatccagggatcccggaacctgcttcagggcgaagagctgctgagagcactcgaccaagtgaac

SEQ ID NO: 33123 - DNA, 2478 bp, synthetic construct
  misc_feature 1..2478: note = Description of Artificial Sequence: Synthetic coding sequence
  source 1..2478: mol_type = other DNA
atggaaggcgctggcggggctaacgacaagaaaaagatctctagcgagcggagaaaggaaaagtctcgcgacgctgccaggtcacgccgtagcaaggagagtgaggttttctacgagctcgcccatcagctccctctccctcacaatgtgagcagccacctagacaaggcctcggtgatgcggctcactatttcctatttgcgagtgagaaagctactcgatgcaggcgacctggatatcgaggatgacatgaaggcccagatgaactgcttctacctaaaggctttggatggtttcgttatggttttaaccgatgacggtgatatgatctacatcagtgacaatgtcaacaagtacatgggcctaacccaattcgagcttacgggccacagtgtctttgatttcacccacccatgcgatcacgaggagatgagagaaatgctgacccatcgtaacgggctcgtcaagaagggcaaggagcagaacacccagcgtagtttcttcctacggatgaaatgtaccttgacatctcgcgggcgtaccatgaacatcaagtcggccacctggaaggtgctccactgcactgggcacatccacgtgtacgacaccaactctaaccagccccagtgcggctacaagaagcctcccatgacctgtctcgttttgatctgtgagcccattccccacccttcgaacatcgagattcccctggattcgaagacctttctgagccggcactcgctggatatgaagttctcctactgcgacgagcgtatcaccgagctcatgggttacgagcctgaggagttgctgggccggtctatctatgagtactaccacgctctggacagcgatcacctgacgaagacgcatcacgacatgtttaccaagggacaagtcactaccggccagtaccgcatgttggctaagcgggggggttacgtctgggtagagacccaggctaccgtcatctataacaccaagaattcccaaccgcagtgtattgtttgcgtgaactacgtggtcagcggtatcatccagcacgacctcatcttctcgcttcagcagaccgagtgtgtgctaaagcccgtggagtcgagcgatatgaagatgacacagctctttaccaaggttgagagtgaggacacctcgtcccttttcgacaagctgaagaaggagcccgatgcactcacacttttggccccagccgccggagacaccatcatctcccttgacttcggatccaacgatacagaaacggatgaccagcaactggaggaagtgcccctctacaacgatgtcatgcttccttccccgaacgagaagcttcagaacatcaacctcgccatgtcaccgttgcccaccgccgagaccccaaagcctctgcgtagtagcgctgatcccgccctcaaccaggaggttgccttgaaactcgaacccaaccccgaatctctggaactgtccttcaccatgccacagatccaggaccagactccttcgccgtccgatggatccacgcgtcaatccagccccgagccgaattcgccgtccgagtactgcttctatgtcgactcggatatggtcaacgagtttaagctcgagctggtggagaagttgtttgcagaagacaccgaggccaagaatcccttcagtactcaggataccgatctcgatctggagatgctggccccctacatccctatggacgacgattttcagctgcggtccttcgaccaactgtctcctctggagtctagctccgcatccccggagtctgcgagccctcaaagcacggttaccgtctttcagcagacgcagatccaggagcctaccgccaacgccacgaccaccacagccaccaccgatgagctgaagaccgtcactaaggaccgcatggaggatatcaagatcctgattgcctccccctctcctacccacatccacaaggaaaccacctcggctacgtccagcccgtaccgtgacactcagagcaggaccgccagccctaaccgcgctgggaagggtgtcatcgagcagacagagaagtcccatcctcgctcgcccaacgtcctcagcgtggcgctctcgcagcgaaccaccgtcccagaggaggagctcaaccccaagatcctggccctgcagaacgctcagcgcaagcgtaagatggaacacgacggatcccttttccaggctgttggtatcgggaccctgctccagcagcctgacgaccacgccgccaccacgtccctgagctggaagcgcgtgaagggctgcaagagttcggagcaaaacggcatggaacaaaagaccatcatcctgatcccctcggatctcgcgtgccgcctgcttggacagtcgatggatgagtcggggctgccccagttaacgtcctacgactgcgaagtgaacgcacccatccagggcagcaggaatttgctgcagggtgaagagctgctgagggcactggatcaagtcaac

SEQ ID NO: 33124 - DNA, 2478 bp, synthetic construct
  misc_feature 1..2478: note = Description of Artificial Sequence: Synthetic coding sequence
  source 1..2478: mol_type = other DNA
atggaaggtgcaggtggtgccaacgacaaaaagaagatttcgtccgaacgccgcaaggaaaagtcccgcgacgcagcgcggtcaagacgatcgaaggaaagcgaagtgttctacgaactggcgcatcagctgcctctgccacataatgtcagctcacaccttgataaggcatccgtgatgcggctgactatctcctatcttcgagtgaggaagctccttgacgccggggatttggacattgaagatgatatgaaagcacagatgaattgtttttacctgaaggcgttggatggttttgtgatggtgcttacggacgacggcgatatgatctacatctcggacaatgtgaataagtacatgggcctgacccaattcgagcttactggtcattcagtctttgactttacccatccatgcgatcacgaggagatgagggaaatgcttacccatagaaatggcctggtcaaaaagggcaaggaacaaaacactcaaaggtcgttctttctgcggatgaaatgtactctgaccagcagaggtcggacgatgaatatcaagtctgcaacgtggaaagtccttcattgtacgggccatattcatgtctatgatactaattcaaaccagccccagtgcgggtacaagaagcctccaatgacttgtttggtgcttatctgtgagcccatcccccatccctcaaacatcgaaatcccacttgattccaagactttcctgagcaggcactccctggatatgaagttctcctactgtgatgaacgaatcaccgagcttatgggatacgaacccgaagaactgctgggaagatcgatttacgaatactaccatgcccttgactcggaccatctcaccaaaacccaccacgatatgtttacgaaaggccaagtgactaccggtcaatatagaatgctggctaaacgtggtggatacgtgtgggtcgaaacccaggcaactgtgatttacaatacgaaaaactcgcaaccccagtgcatcgtgtgtgtaaactacgtggtttctggaataatccaacacgatctgattttctcgttgcaacagacggaatgtgtcctgaagcccgtcgagtcgagcgatatgaaaatgacccagctcttcactaaggtcgagtcggaagatactagctcgctgtttgacaagctgaagaaggagccggacgcacttacgctgttggctcctgcagcaggcgatactattatctcgctggattttggatccaatgatactgagactgacgaccaacaacttgaagaagtgccgctttacaatgacgtgatgctgccttctcccaatgaaaagctgcagaacattaatctcgccatgtcaccattgccaactgcggaaactcccaagccccttcgttcaagtgctgaccctgccctgaaccaggaggtggctcttaaactggagcctaaccctgaatcgttggaactttcgtttactatgccccagattcaagaccaaactcctagcccaagcgatggttccactagacaatcctcaccagaaccaaactcgccgtccgaatactgtttctacgtcgattcagatatggtcaacgagtttaagttggagctggtggaaaagttgttcgccgaggacaccgaagcaaagaaccctttttcgacccaggacaccgacctggacctggagatgctcgcaccatacattcctatggacgatgactttcagttgcgctccttcgatcagctctcgcctctggaaagctctagcgcatccccagagtcagcatcccctcagtcaaccgtgacggtgtttcagcagactcaaattcaagagcccaccgcaaacgctaccacgactaccgcaacgaccgacgaactgaaaactgtgactaaggatcgtatggaggacattaagattttgattgcttcgccatccccaactcacattcataaggaaactaccagcgccaccagctcaccgtacagggatacccagagcagaaccgcatccccaaaccgggccgggaagggtgtgattgagcaaaccgagaaaagccatcctcggtccccgaacgtgctttcggtcgccctttcgcaacgtactaccgtgccagaagaagaactgaacccaaagattttggcgctccaaaatgcacaaaggaaaagaaagatggagcacgatggttccctctttcaagcggtgggtattgggaccctgcttcaacagcctgatgatcatgcggccaccactagcctgagctggaagagagtgaaaggttgtaagagctcagaacagaacggtatggaacaaaagaccatcatacttattccttcggatctcgcatgcagattgcttggtcagtcaatggacgagtcaggacttccccaactgacctcatacgattgtgaggtgaacgctcctattcaaggaagccggaaccttttgcaaggggaggagctgctgcgcgcgctggaccaggtgaac

SEQ ID NO: 33125 - DNA, 2478 bp, synthetic construct
  misc_feature 1..2478: note = Description of Artificial Sequence: Synthetic coding sequence
  source 1..2478: mol_type = other DNA
atggaaggggcaggcggggctaatgacaagaagaaaatttctagtgaacgtagaaaggagaaaagtagagacgcggcacgcagcagacgaagtaaagaaagtgaggtgttctatgagttagcccaccagctccccctacctcataacgtatcttcacatctcgataaagcgtctgtgatgcggttaactatcagctacttgagagtgcgaaaactactggatgctggtgaccttgatattgaggacgacatgaaggcccaaatgaactgtttctatctgaaagctttggatgggttcgtgatggtgcttactgatgatggcgatatgatctatatctctgataatgtcaataaatatatgggactgacccagtttgagcttactggccactctgtatttgacttcactcacccgtgtgatcatgaggagatgcgtgagatgctaacacaccgtaatggtctggttaaaaaaggcaaagaacagaacacccagcgtagtttctttctgaggatgaaatgtactctcacgtcccggggccgtacgatgaacattaagagcgcaacctggaaggtcctgcactgtacaggtcatatacacgtttacgatactaattctaatcaaccccagtgcggctacaagaagcctcctatgacatgcttggtcctgatttgcgaaccaattccccacccttcaaacatagaaattcctctcgattccaagactttcctcagcagacacagcctggatatgaagtttagttactgcgacgaaagaatcaccgagcttatggggtacgagccggaggagcttctgggtagatctatttatgaatattatcatgctctagactcggaccatctgacaaagactcatcacgatatgttcactaaaggccaggtgacaacaggacaataccgtatgttggctaagagaggagggtacgtgtgggtcgaaactcaggctaccgtgatctataacacaaaaaacagtcagcctcaatgcatcgtctgcgtgaattatgtggtgagtgggatcatacagcatgatctgatcttttctctgcaacagaccgaatgcgtgcttaagccagttgaaagctctgacatgaagatgacacagctctttaccaaggttgagagtgaagacacctcgagcctgttcgataaactcaagaaggagcctgacgcccttacattgttagcccctgctgcgggtgacaccatcatctccctcgactttgggtccaacgacaccgagacggatgaccagcagctcgaagaggtacctttatataacgacgtgatgttgccatccccaaatgagaaattacagaatatcaacctcgccatgagtccactgcctacagcggagacacctaagcctttacgaagctctgccgacccagcattaaatcaggaggtggcactcaaattggaacccaaccccgagagcctggagctatccttcaccatgccccagatccaggatcagaccccatctccctctgatggctccacccggcagtctagcccagaacccaactcaccctcagaatactgcttctatgtcgatagcgacatggtgaacgagtttaagctggagctggtggagaagctattcgcggaagacaccgaggcaaagaaccccttctcgacgcaggacacagacctggatctcgagatgttggctccgtatatccccatggacgatgactttcagcttagaagcttcgatcaactttctccgttggagtcctcctccgccagtccagaatccgcctctcctcagtctaccgtaacagtcttccagcagacccagatccaggagcctactgccaacgccaccacaaccaccgctaccactgatgagctcaaaactgtgaccaaagacaggatggaagatatcaagatcctgatcgcctctccgtctccaacccacatccacaaagagacaaccagcgctacttcaagtccttaccgagatactcagtcaaggaccgcgtctcctaaccgcgctggtaagggggtcatagagcaaacagagaagtcccacccccgctcccctaatgtgctctctgttgccctgtcacaaaggactactgtgccggaagaagagcttaatccaaaaattctggctctgcagaatgctcagaggaagaggaagatggagcacgatgggtcactgtttcaggcagtgggtataggcactttgcttcagcagccggatgaccatgccgcgacaactagtctgtcctggaagcgggtaaagggctgtaagtcatcagaacaaaacgggatggaacagaaaacgattatattgattccttccgacctggcatgcaggttgctgggccaatcaatggatgagtctggcctccctcagctaacgagttatgattgcgaggtcaacgccccgatacaggggtcccggaatttacttcaaggggaagaactgctccgggccttggatcaggtgaac

SEQ ID NO: 33126 - DNA, 2478 bp, synthetic construct
  misc_feature 1..2478: note = Description of Artificial Sequence: Synthetic coding sequence
  source 1..2478: mol_type = other DNA
atggagggagctggcggagccaacgacaaaaagaagatctcctccgagcggaggaaggagaagtcacgcgacgcagcgagatcaagacgcagtaaggagtcggaagtgttctacgaactggcacatcagctcccgctccctcataatgtctcctcacacctggacaaggcatcagtgatgcggctgacgatcagctacctgcgcgtccggaaactgctggatgccggagatctggacattgaggacgatatgaaggcccaaatgaactgcttctacctcaaggcgcttgacggattcgtcatggtgctcaccgatgatggggacatgatttacatcagcgataacgtcaacaagtacatggggctcacccagttcgagctgactggccactccgtgttcgatttcacgcacccgtgcgatcatgaagagatgcgtgagatgctgacgcaccggaacggactggtgaagaaaggcaaggagcaaaacactcagaggtcgttctttctgagaatgaagtgcaccttgacctcgcggggacggactatgaacataaagtcagcgacttggaaagtgttgcattgcaccggacatatccacgtgtatgacactaactcgaatcaaccgcaatgcggatacaaaaagccgccgatgacctgtttggtgctgatttgcgagcctatcccacatccgagcaatatcgagatcccactggacagcaaaacctttctctcgcggcacagcctggatatgaagttcagctactgcgacgaacggatcaccgaactgatgggctacgagccggaagagctgctgggacgctcgatctacgagtactaccacgcgctggacagcgatcaccttaccaaaacccaccacgatatgtttactaaaggccaagtgactactggtcagtaccggatgctggcgaaacgcggaggatatgtctgggtggaaacccaggcgaccgtgatctacaatactaaaaactcacagcctcaatgcatcgtctgcgtgaattacgtcgtctccggcatcatccagcacgaccttatcttctccttgcagcaaacggaatgtgtcctgaagcctgtcgagtccagcgatatgaagatgacccagctgttcactaaagtggaatccgaggacacctcttcgctctttgacaaactgaaaaaggaaccggatgcccttaccctcctggcccctgccgccggagacacgatcatttccctcgatttcggatccaatgacaccgagactgacgaccaacagctggaggaagtgcccctttacaacgatgtgatgttgccttcgccaaacgagaagctccaaaacatcaacctggccatgtcaccgctgccaaccgccgaaacccccaagccgctgagatcctctgctgacccagccttgaaccaggaggtggcactgaaactggagccgaaccccgaatccctcgagttgagcttcaccatgccacaaattcaggatcaaacgccatccccttcggacggctcgaccagacagtcctcgcccgagcccaattcgccgagcgaatactgtttctacgtggactccgatatggtgaatgagtttaagctggaattggtcgagaaactcttcgcagaggataccgaagcaaagaacccgttctctactcaagacacggatcttgacttggaaatgctggccccatacatcccgatggacgacgatttccagctgagatcgttcgaccagctctcgccactggaatcctcaagcgcatcaccggagagcgcatctccccagtcgactgtcaccgtgttccagcagacccaaattcaggaaccgactgccaacgccacgaccaccaccgcaactaccgatgaacttaagaccgtgaccaaagaccgcatggaggatatcaagattctgatcgcatctccctcacctacccacattcacaaggagactacctcagcgacctcgtcgccctaccgcgatactcagagccggaccgcctcgcctaaccgcgccgggaaaggtgtgatcgaacagactgagaagtcccaccctcgcagcccgaacgtcctctccgtggccctttcgcagcggaccacggtgccggaggaagaactgaacccgaagattctcgcgctgcagaacgcccaaagaaaacgcaagatggaacatgacggatcactgtttcaagccgtcggcatcggcaccctccttcagcagccagatgatcacgcagcaaccacctcgttgagctggaagcgggtgaaaggctgcaagtcatcagagcaaaatggaatggaacaaaagaccattattctgatcccatcggacctggcctgccggctgctcggccaatccatggatgaatccggattgcctcagctgacctcatacgactgcgaggtgaatgctcccatccagggatcgcggaacctccttcagggagaggagctcttgcgagcgctcgaccaagtcaac

SEQ ID NO: 33127 - DNA, 2478 bp, synthetic construct
  misc_feature 1..2478: note = Description of Artificial Sequence: Synthetic coding sequence
  source 1..2478: mol_type = other DNA
atggagggcgcaggaggcgctaatgataaaaagaagatcagctcggagcgccgcaaagagaagtctcgggatgcagcccgaagcaggagatcaaaagaatcagaggtgttctacgaacttgcgcaccagttaccgttaccccataatgtgtcaagtcatctggataaagcttctgtaatgaggttaaccatttcatatctgcgcgtccgaaagctcttggatgcaggcgatctcgatatcgaagacgacatgaaggcccagatgaattgtttttatcttaaagcgctggacggctttgtgatggttttgaccgacgacggtgacatgatttacatctccgataacgtgaacaagtatatgggcctgactcagtttgaattgaccggtcacagtgtttttgactttacccatccctgtgaccacgaggagatgagggagatgttgactcacagaaacggtctggtgaaaaaaggcaaggagcagaatactcagcgatccttcttcctgagaatgaaatgcactctcaccagccgaggccgcactatgaatatcaagagcgccacttggaaagtgctccactgtaccggccatatacacgtgtacgatacaaacagcaaccaaccccagtgcggctacaagaagcccccgatgacctgtttggtactgatatgtgagcctatacctcatccttctaacatcgagatccctcttgactccaaaacattcctctcccgccactcacttgacatgaagttcagctactgcgacgagcgaatcacggagctcatgggctatgagccggaagagctactgggccggtccatttatgagtactaccacgctttggattcggaccacctgactaaaactcatcatgatatgtttacaaaagggcaggtgactactgggcaatatcgaatgctggctaaaagaggagggtacgtttgggtggaaacccaggccacggttatatataacactaaaaatagccagcctcaatgtattgtgtgcgtgaattacgtggtgagtggcataatacagcacgatttaatcttttcactgcagcagaccgaatgtgtgcttaagcccgtggaatctagcgacatgaaaatgactcagctgtttactaaagtagaatccgaggacaccagctcccttttcgacaagctcaagaaggagccagacgctctgaccctgttggcgcctgcagccggagacaccatcatatccctagacttcgggtcaaacgacactgagacagatgaccagcagctagaagaggtaccactatacaatgacgtaatgctgccctcacccaacgagaaactccaaaacatcaatttggctatgtcacccctgcctaccgccgaaacccccaaaccgctccgaagttccgccgatcccgcccttaatcaagaggtagctctcaaactggagcccaacccagagtcactggaactgagcttcacgatgccccagatccaggatcagaccccatctccatctgatgggtctacacggcagtcatcacccgaaccaaatagcccaagtgaatattgtttttatgtggacagtgacatggtcaatgaatttaaactggaactagtggagaagctcttcgcagaggacactgaggccaaaaatcctttcagtactcaagacactgatctggatcttgagatgctggcgccgtacattcctatggacgatgactttcagttacggagtttcgaccagctcagcccactggaatctagcagcgcgtcgccagaaagcgcaagtccacagtcgacagtcaccgtcttccagcaaacacagatacaggaacccaccgctaatgccactaccacgaccgcaacgaccgacgagctgaagaccgtcaccaaagatcgtatggaagatatcaagatccttatcgcctcccccagccccacgcatatacacaaggaaacgacctccgctacctcctccccctatcgggatactcaatcaagaacggcgagtccaaaccgcgcgggaaaaggtgtgatcgaacagacagagaaaagtcaccctaggtctcctaatgtacttagtgtagcactgtcccagcgcacaaccgtgccagaagaagaattaaatcccaagattctggctttgcaaaacgcccagaggaagaggaagatggaacatgacggctcactattccaggccgtgggcattggtactcttctgcagcagccagacgatcatgcggccacaacctctctgtcttggaagcgcgtgaaagggtgcaagtccagcgagcaaaacggaatggagcagaagacaatcattctgattccttccgacctcgcttgccgactgctgggccaaagtatggacgagtctgggcttcctcaattaacaagttatgactgtgaggtgaacgcccccatccagggatcgcggaatttactgcagggagaggaactcctccgcgccctagatcaggtgaac

SEQ ID NO: 33128 - DNA, 2478 bp, synthetic construct
  misc_feature 1..2478: note = Description of Artificial Sequence: Synthetic coding sequence
  source 1..2478: mol_type = other DNA
atggagggagctggtggggcaaacgacaagaaaaagatttcaagcgagcgaaggaaggagaaatcgcgcgatgccgcaagatcccgtagatccaaggagtcggaagtgttttatgaactggcccaccagcttcccctgccacacaatgtgtcgagtcacctggataaagcgtccgtaatgagactcacgatttcttatttacgggtgagaaagttgctcgacgcaggcgaccttgacatcgaggacgatatgaaagcgcagatgaactgtttctatctgaaagctctagacggctttgttatggtgctgacagacgatggcgatatgatatatattagcgataatgtgaacaagtacatggggctgactcagttcgaactcacaggacactctgtgtttgacttcacgcacccctgtgaccacgaggaaatgagggagatgttaacccacagaaatggcctggtcaaaaaaggcaaggagcagaatacacagcgcagcttcttcctcagaatgaaatgtacactcacttctcgggggagaactatgaatattaaatctgcaacctggaaagttcttcattgcacaggccacatacacgtatacgacaccaatagcaatcagcctcagtgtggttataagaagccccctatgacatgccttgtgctcatctgcgagcctatcccacacccaagcaatatagaaatccccctggattccaagaccttcttatcacggcactccctggatatgaaattcagttattgcgacgagcggattacagaacttatgggctacgagccagaggagctgctaggtcgaagcatatacgaatactatcacgccctcgactctgaccacctgacaaagacgcaccacgatatgtttacaaagggacaggtcacaacgggacagtaccgaatgctcgcaaagaggggcggttatgtgtgggtggagacacaggcaacagttatctataataccaaaaactcgcaaccacagtgtatcgtgtgcgtgaattacgtagtttctggcattattcagcacgatctgatattctctctgcagcaaactgagtgcgtcctcaagcccgtagagagctcggatatgaaaatgactcagctctttacgaaggttgaatcagaggacacgtccagcttgttcgataagctgaagaaggagcctgatgcactgacactgctcgctcctgcggccggagacaccattatctcgctcgatttcggatccaacgacactgagactgacgatcagcagcttgaggaggtgcctctatacaatgatgtgatgctgccaagcccaaatgaaaaactccaaaacatcaatctggcgatgtcccccctccctaccgcggagacccccaagcccctccgatccagtgcagatccggctctgaaccaggaagttgccctcaagctcgagcccaatccagagtcactggagctgagctttaccatgccacaaattcaggaccagacccccagtccttcagacgggagcacgagacagagctcgcctgaaccaaattccccctccgagtactgcttctatgtcgacagcgacatggtgaatgagtttaaactggagctggtggaaaagctgtttgcagaggacacagaggccaagaatcccttctcaactcaagatactgaccttgacttagagatgctcgccccttacatcccaatggatgacgattttcagctgcggtcattcgatcagttgtcccccctggaatcttcctcggctagcccggagtcagcctccccacagagcaccgtcaccgtgtttcaacaaacccagattcaggaacctacagccaacgccacaacgacaactgctacaactgacgagctgaaaaccgtcacaaaagatcgtatggaagatattaaaattttgatcgcctcccccagtcccacacacattcacaaggaaacaacgtcagctacttcttcaccctaccgcgacacacagtctcgaacagctagcccaaacagagccgggaaaggtgtgattgaacagacggagaaatctcatccgcgaagtcctaacgttttatctgtcgcattaagtcagcgcaccacagtcccagaggaagaactgaacccaaagatcctcgctcttcagaacgctcaaaggaaacgcaagatggaacacgacggctctctgtttcaagctgtcggaattggtaccttgttgcagcaaccagacgatcacgccgctactacctctttgtcctggaagcgagtgaagggctgcaagtctagcgagcagaatggtatggaacaaaagacaattatccttatcccaagcgacttggcctgcaggctcctgggccagtccatggacgaatccggactccctcagctgacaagctacgactgcgaagtgaacgcccccatacagggttcgcgaaatctcctccagggcgaggagttactaagggcactggatcaggtgaat

SEQ ID NO: 33129 - DNA, 2478 bp, synthetic construct
  misc_feature 1..2478: note = Description of Artificial Sequence: Synthetic coding sequence
  source 1..2478: mol_type = other DNA
atggaaggggccggaggcgcgaatgataagaaaaagatttcgtctgagcgccggaaggaaaagtcaagagacgcagcacgtagccgccgctcgaaggaatctgaagtcttttatgaactcgcgcatcaactcccactgcctcacaatgtgtcgtcccacctcgacaaggcctcagtcatgaggcttaccatatcgtaccttcgggtccgtaaacttctcgacgcaggcgatctcgacattgaagatgatatgaaggcgcaaatgaattgcttttatcttaaagcacttgacggatttgttatggtgttgaccgacgatggagacatgatttacatttctgataacgtgaataagtacatgggactgacgcagtttgagctgaccgggcatagcgtctttgattttacccatccatgcgaccatgaagaaatgcgagagatgcttactcaccgaaacggtctggtgaagaagggaaaagaacaaaatacgcaacggagcttttttcttaggatgaagtgcactcttacctcccgaggtcggaccatgaacataaagtcggctacttggaaggtcctccattgtactggacacatacatgtctacgatacgaatagcaaccagccgcaatgtggatacaaaaagccccctatgacctgtctcgtgctgatttgtgaacctatcccacatccttccaacattgaaatccccctggactccaaaacgttcctgtccagacattcccttgacatgaagttttcgtactgcgacgaaagaataactgagctgatgggttacgaacctgaagaacttcttgggcgttccatctacgagtactaccatgcccttgattccgatcacctcactaagactcatcatgatatgtttaccaagggacaagtgacgaccggtcagtatcgaatgctggcgaaacggggtggttacgtgtgggtggaaactcaagcaactgtgatttacaacaccaagaattcgcagcctcaatgtattgtatgcgtcaattacgtggtgtcgggcataattcagcacgacctgattttcagcctgcaacaaactgaatgtgtgttgaagcccgtggagtcatcggacatgaagatgactcaactgtttaccaaagtcgaatctgaagatacttcatcactctttgataaactcaagaaggagccagatgcacttactctgcttgccccggcggcgggagatactatcatttcactggatttcggtagcaatgatacggaaaccgacgatcagcagcttgaggaggtccctctgtacaacgatgtcatgctgccgtcgccgaacgagaaattgcaaaacatcaacctggccatgtcgccacttccaactgcggaaaccccaaagcctcttaggagctccgccgatcccgccctgaaccaggaggtggcccttaagctcgagcctaacccagaatcgttggagctttcattcactatgcctcaaattcaagaccagaccccttcaccgagcgacggctcgaccagacaaagctcgcccgagcctaactccccaagcgagtattgcttttacgtggattccgatatggtcaacgaattcaagctggagctcgtggaaaaactttttgcagaggacactgaagctaagaacccattctccactcaagataccgatctggaccttgaaatgctggcaccgtacatccctatggatgatgatttccaacttcggagctttgaccagctctcacctcttgagtcatccagtgcttcccctgagtccgcatcgccccagtctactgtgactgtattccaacaaacgcagatccaagaacccaccgctaacgcaactactaccaccgccactaccgatgaactgaaaacggtcaccaaggataggatggaagatatcaaaatactgatcgcaagcccctccccaacccacattcataaggaaactacttcagcaacctcgtcgccatacagagacactcaatcgcgtaccgcttccccaaaccgcgcaggcaagggagtcatcgagcaaacggagaaaagccatccccgctccccaaatgtcctttcggtggctctttcccaacgtaccaccgtgcctgaagaggagctgaacccgaagattcttgcgctgcaaaacgcccagcgaaagagaaagatggaacacgacggatcgcttttccaggccgtaggaatcggcactctgctccagcagccagatgatcacgcggcgaccacctcgctttcatggaagcgtgtgaaaggctgtaagtcctcggaacagaacgggatggaacaaaagactatcatacttattccttcagatctggcatgtcgccttttgggacaaagcatggacgaatccgggttgccacagcttacctcctacgattgtgaagtgaacgcccccattcaagggtccagaaatctgctgcagggagaggaactgcttagggcactggatcaggtgaat

SEQ ID NO: 33130 - DNA, 2478 bp, synthetic construct
  misc_feature 1..2478: note = Description of Artificial Sequence: Synthetic coding sequence
  source 1..2478: mol_type = other DNA
atggaaggagcaggtggagctaatgataaaaaaaaaatatcaagtgaaagaagaaaagaaaaatctagagatgcagcaagatcacgacgaagtaaagaatctgaagttttttatgagttagctcatcaattaccacttccacataatgtttcgagtcatcttgataaggcatcagttatgcgacttaccatatcatatttaagagtaagaaagttattagatgcaggagatcttgacattgaagatgacatgaaggcacaaatgaactgtttttatttaaaagctttagatggttttgttatggtattaacagatgacggtgatatgatttacattagtgataatgttaataagtatatgggacttacacaattcgaattaaccggacattcagtttttgattttacccatccatgtgatcatgaagaaatgagagaaatgttaacccatagaaatggacttgtcaagaaagggaaagaacaaaatacacaaagaagtttttttcttcgtatgaagtgtacacttacttcaagaggaagaactatgaatatcaaatcagctacatggaaagttttacattgtaccggacacattcatgtctatgatacaaactcaaatcaacctcaatgtggatataagaaaccaccaatgacatgcttagttcttatttgtgaaccaattccacatccttcaaatattgaaattccattagattctaagacctttttaagtcgtcattcattggatatgaaattttcttattgcgatgaaagaattacagaattaatgggatacgaaccagaagagttacttggtagatctatttatgaatactatcatgctcttgattctgatcatcttactaaaacacatcatgatatgtttacaaaaggacaagttactactggacaatatagaatgttggctaaaagaggaggttatgtttgggtagaaactcaagctacagttatttataatacaaaaaattcacaacctcaatgcattgtttgtgtaaattatgttgtttcaggtattattcaacatgatttaattttttctttacaacaaacagaatgtgtccttaaaccagtggaaagtagtgatatgaaaatgacccaattatttacaaaagtagagtcagaagatacttcaagcctttttgataaattaaaaaaagagccagatgctttgactttgcttgcaccagcagcaggtgatactattattagtttagattttggatctaatgatacagaaacagatgaccaacaattagaagaagttccattatataatgatgttatgttaccatcaccaaatgaaaaacttcaaaatattaatttggccatgtcaccattacctactgcagaaactcctaaacctttaagatcttcagcagatccagctttaaatcaagaagttgctttaaaattagaaccaaatccagaatcattagaattatcatttactatgccacaaattcaagatcaaacaccatcaccatcagatggttctactagacaaagttcaccagaaccaaattcaccatcagaatattgtttttatgttgatagtgatatggttaatgaatttaaattagaattagttgaaaagttatttgctgaagatactgaagcaaaaaatccttttagtacacaagatactgatttggatttagaaatgttagcaccttacattcctatggatgatgattttcagttgagatcttttgaccaattatcaccattagaatcttcaagtgcatctccagaatctgcatctcctcaatctactgttactgtatttcagcaaacacaaatccaagaaccaactgcaaatgcaacaaccacaactgctacaacagacgaattaaagacagttacaaaagatagaatggaagatattaaaatccttatcgcaagtccttcaccaactcatattcataaagaaacaacttctgctactagtagtccatatcgtgatacacaaagtcgtacagcttctccaaatagagctggaaaaggagtaattgaacaaaccgaaaaatcacatccaagatcaccaaatgtacttagtgtagctttaagtcaaagaactactgttccagaagaagaattgaatccaaagatattagctcttcaaaatgcacaaagaaaacgtaaaatggaacatgatggttcactttttcaagcagttggtataggtactttattacaacaacctgatgatcatgctgcaacaacttcattatcatggaaaagagtaaagggatgtaaatcaagtgagcaaaatggtatggaacaaaaaacaattattcttataccttctgatttggcttgtcgtttattaggtcaatcaatggatgaatcagggttaccacaacttacttcatatgattgcgaagttaatgctccaatacaaggatctagaaacttattacaaggagaagaacttcttagagcattagatcaagttaac

SEQ ID NO: 33131 - DNA, 2478 bp, synthetic construct
  misc_feature 1..2478: note = Description of Artificial Sequence: Synthetic coding sequence
  source 1..2478: mol_type = other DNA
atggagggagccggtggtgcaaacgataagaagaaaatctcatccgaaaggcgcaaggaaaagtccagagacgcagcacggtccagaaggtccaaggagtccgaagtgttctacgaactcgcacatcagcttcccctccctcataacgtctcgtcacacctggacaaggcttcggtgatgagactgactatttcgtatcttcgggttagaaaacttttggatgcgggggacctggacatagaagatgatatgaaggcacaaatgaactgcttctaccttaaagccctggacggcttcgtgatggtgctgactgatgatggtgacatgatttacatctcagacaatgtcaataagtacatgggactgacccaatttgaattgaccggtcattccgtgtttgactttactcacccttgtgatcacgaagagatgcgcgaaatgcttacccaccgaaacgggctcgtcaagaagggcaaagaacagaacactcaaagatcgttttttctcagaatgaagtgtaccctgacctcacggggtcgaactatgaacatcaaatccgctacttggaaggtcctgcattgcactggacatattcacgtgtacgatactaattcgaaccaaccacagtgtggatacaaaaaaccgcccatgacctgtctggtgctcatttgtgagccaattcctcatccatctaacattgaaattcctttggatagcaagaccttcctgtcaagacattcactggacatgaaattcagttactgtgatgaaagaatcaccgaactgatgggctacgaacctgaagagctcttgggcagatcgatctacgagtactaccacgcacttgattctgatcatctgaccaaaacccatcacgacatgttcacgaagggacaggtgactaccggccaatacagaatgttggccaagaggggcgggtacgtgtgggtggaaactcaggcaacggtgatttacaatactaagaacagccaacctcagtgtatcgtgtgcgtgaactatgtggtgtcaggcatcattcaacacgatcttatcttcagccttcagcagaccgaatgtgtgcttaaacctgtcgaatcaagtgacatgaagatgacgcaactcttcaccaaagtggagagcgaggacacctcatccctgtttgataaactgaagaaggaacccgatgccctgaccttgcttgcaccagccgctggagacactattatctcgctcgattttggtagtaacgatactgaaaccgatgaccagcagcttgaggaggtgcctctctacaacgacgtgatgcttccatcccccaacgaaaagttgcagaacataaatcttgcaatgagccctttgcctactgcggagactcctaaacctctgaggtcctccgccgacccggcactcaaccaagaagtggctcttaagctcgaaccaaaccccgaatctcttgaactctcgtttaccatgcctcagatacaggatcagacgccgtccccaagcgatggcagcaccagacaatcctcccctgagcccaacagcccttcagaatactgcttctacgtggactcggatatggtgaacgaattcaaactggaactggtggagaagctgttcgccgaagataccgaggcgaaaaacccttttagcactcaagacactgatttggatcttgaaatgctggcgccttacattccaatggatgatgactttcaacttagatcatttgatcagctgtcgccacttgaatcaagctcagcctcgccagaatcagcaagcccccagagcactgtgacggtgtttcaacagacccaaattcaggagccaaccgccaacgccaccaccactactgcaactactgatgagctcaagaccgtcaccaaggatcgcatggaagatatcaagatccttattgcgtctccatcccctactcatattcataaggaaaccactagcgctacgtcgagcccttacagagacacccaatcccggactgcaagccctaaccgcgcgggaaagggggtcattgaacagaccgagaagtcccatccccgatcgccaaacgtgctttccgtcgcactttcgcaacgtaccaccgtccctgaagaagaattgaaccccaagattctcgcacttcagaacgcacaacggaagaggaagatggaacatgatggaagcctcttccaagccgtcgggattggaactcttctgcaacagcctgacgaccatgccgcaactacctccctgagctggaagcgagtcaaaggttgcaaatcttctgagcagaacggaatggaacaaaagacgatcatcctcattccctcggatctcgcgtgtaggcttcttggtcagtcgatggacgaaagcggcttgccacagctcaccagctacgactgtgaagtcaatgcgccgattcaaggttcccggaaccttctgcagggcgaagaactgctcagggcacttgatcaggtgaat

SEQ ID NO: 33132 - DNA, 2478 bp, synthetic construct
  misc_feature 1..2478: note = Description of Artificial Sequence: Synthetic coding sequence
  source 1..2478: mol_type = other DNA
atggagggcgcaggtggtgctaatgacaaaaaaaagatcagtagcgaacgcagaaaggagaagtcccgcgacgccgccagaagtcgcagatctaaggagtctgaggtgttctacgaactcgcacaccagctccccctgccccacaacgtgagttcccatctcgataaggcctctgtcatgcgtcttaccatctcatatctccgcgtgcgtaagctgctcgatgcaggagatctggacatagaggacgacatgaaagctcagatgaattgcttctacctgaaggcactcgatggcttcgtcatggttctgactgacgacggtgatatgatctacatcagcgacaacgtgaataaatacatgggcctgacccagttcgagctgaccggtcattctgtctttgatttcacccacccctgcgatcacgaggaaatgcgcgaaatgttgacacatcgtaacggcctggttaagaaaggtaaggagcagaacacacagcgctctttctttctcaggatgaaatgtacattgacatccagaggtcgcaccatgaatattaagtccgctacttggaaggttctgcactgcacaggtcacatccacgtgtacgacaccaattcaaaccagcctcagtgcggatataaaaagccccctatgacctgcctcgtgctcatctgcgaacctattccacatccaagtaacatcgagatccctttggactctaagacttttctctctcgtcattccctggacatgaaattctcctactgcgatgagcgtattaccgagttgatgggatatgaacccgaggagctgttgggaaggtccatctatgagtactatcacgcactggattctgatcatctcactaagacacaccatgatatgtttactaagggtcaagtcactaccggccaatataggatgcttgccaagaggggtggctacgtgtgggtggagacccaggccaccgtgatctataacactaagaactcacagcctcagtgtatcgtttgcgtcaattatgtggtttccggtatcatccagcatgatctgatcttctccctgcaacagacagaatgtgtgctgaaacccgtagagtcctctgatatgaagatgacccagctctttacaaaagtcgaatccgaagatacttcaagcctttttgataagctcaagaaagagcctgacgcccttacattgttggctccagcagctggtgacaccatcatcagcctggatttcggctctaatgacaccgaaacagatgaccagcagctcgaggaggtgccattgtacaacgacgttatgctgcccagccccaacgagaagctgcagaatatcaacttggcaatgtccccacttcctacagctgagactcccaagcccttgaggtcctccgccgaccctgcattgaaccaggaagtggctctcaagctcgaacctaatcccgaatcattggagctgagctttaccatgccccaaatccaggaccagaccccctctccaagcgatggatctacccgtcagtctagccctgagcctaactccccctccgagtactgcttctatgtcgacagcgacatggtaaacgagtttaagctggaactcgtcgaaaaactgtttgctgaagataccgaggccaagaatcctttttcaacccaggacacagatctcgacctggagatgcttgccccatacattccaatggacgacgacttccaactcaggtcctttgaccagctgtcccctctggaaagctcatcagcttctcccgagtcagccagtccccaaagcacagtaaccgtgttccagcagacccaaatccaagagcctactgctaatgcaactaccacaaccgccaccactgatgagctgaagacagtcacaaaggatcgtatggaggatataaagatacttatagccagcccctctcctactcacattcataaagaaacaacctccgctacttccagcccttatcgcgacactcagtctagaactgcttccccaaatagggcaggaaagggagttatcgagcagaccgaaaagtcccacccaaggtcccctaacgttctgagcgtcgccttgtcacagagaactactgtccctgaggaagagctgaaccccaagattctcgcactgcaaaacgcccagcgcaagcgtaagatggaacatgatggttcacttttccaggctgtgggtatcggcaccttgctccagcagcctgatgatcatgctgccacaacaagcctgtcctggaagcgcgtcaaaggctgcaagagttcagagcagaacggcatggagcagaagactataatccttatcccctcagatctcgcctgtaggctgctgggtcagtcaatggacgagagtggacttccccagcttacatcttatgactgcgaggtgaatgcccctatccagggtagccgtaatctcctgcagggagaggaacttctccgcgcattggatcaggttaat

SEQ ID NO: 33133 - DNA, 2478 bp, synthetic construct
  misc_feature 1..2478: note = Description of Artificial Sequence: Synthetic coding sequence
  source 1..2478: mol_type = other DNA
atggagggggccgggggagccaatgacaaaaagaagatatcaagtgagaggaggaaggaaaaaagccgcgatgccgcccgatcccgacggagcaaggagtcagaggtgttttatgaactggcgcatcaactcccgctgccacataatgtgagtagccatttggacaaggccagtgtaatgcgactaacaatcagctacctccgagtgcgtaagctccttgacgctggggatctggacattgaagacgatatgaaggcccagatgaactgcttctatctgaaggctctcgatggttttgtaatggtgctgaccgacgacggggacatgatttatatttccgataacgttaataagtatatgggcctcacgcagtttgaactgaccgggcatagcgtatttgactttacgcatccgtgcgatcacgaggaaatgcgggagatgttaactcataggaatggactcgttaagaaagggaaggagcagaatacccagcgctccttttttctgcgaatgaaatgtactctaacgtcaaggggtaggacgatgaacatcaaaagtgccacgtggaaggtgttgcattgtacaggccacatccatgtgtatgatactaattcaaaccagcctcaatgtggctacaagaaacctccaatgacctgcttggtcctaatttgtgagcccatcccccaccccagcaatatagagatcccactggatagcaagacttttctttcacgccacagcttagacatgaagttttcatactgcgatgagcggattactgagcttatgggttacgagccagaagaactcttaggccgctccatctacgagtattatcacgcattggatagtgatcatttaacaaaaacgcaccatgacatgtttacaaaaggccaggtcaccactggccaatacagaatgctggctaaaagaggggggtacgtttgggttgagacccaagctaccgtaatctataatactaagaatagtcagccccagtgcatcgtgtgtgtgaattatgtggtgtccggaatcattcagcatgatctgatctttagtctgcagcagacagaatgtgtccttaagccggtcgagagttcagacatgaagatgacccagctcttcaccaaggtagagtccgaggatacttcttcgctcttcgataagttgaaaaaggaaccggatgccttaacgctactggcacccgcagctggcgacacaattatcagtttggatttcgggagtaatgatacagagaccgacgatcagcaactggaagaggttcccttatataatgatgtgatgctgccatctccgaacgaaaagttgcaaaacatcaatttggcaatgagtccactccccacggccgagacgccaaagcccttgaggtccagtgcggatcccgccctaaaccaggaagtggcgttgaagctggagccgaacccggagtcattggagctcagctttacaatgccacagatccaagaccagaccccaagccccagcgatggtagtacaaggcagagttcacccgaaccaaacagcccaagcgagtattgcttttatgtggattccgacatggtgaacgagtttaagctagagctggtagagaagttgttcgctgaggacacggaggccaaaaaccccttttctacacaggatacagatctcgatctcgagatgcttgcaccctacatcccaatggacgatgatttccagctgcggtcctttgatcagttaagccctctggaaagctcttccgccagtccagagtcggcatccccgcagtcaacagtgacagtgttccaacagacgcagatccaggaaccgaccgccaacgccacgacaactacggccacgaccgatgaactgaaaacagtgacaaaggaccggatggaagacatcaaaatcctgattgcatcccccagtcccacccacatccataaagagactacttcagcaacgagctcaccttacagagacactcaatctcgaacagcatctcccaacagggcgggcaaaggggtgatcgagcagacagaaaaatcgcaccctcgcagtccaaacgtactttcagtagctctgtcacagagaacaaccgtgccggaggaagagcttaatcccaaaatcctcgccttgcagaacgctcagagaaaacgcaagatggagcacgatggtagcttattccaagctgtgggcatcggaacactgctgcagcagcctgatgaccacgccgccaccacgtccctatcttggaagagggtcaagggctgcaagtccagcgagcagaatggtatggagcagaagaccattatactgatcccctcggatctggcatgcagactgctgggtcagagcatggatgaatctggcctgccacagctgacttcctacgactgtgaagttaacgcccccatccagggcagtaggaacctcctgcagggcgaagagctactgcgcgccctggatcaggtcaat

SEQ ID NO: 33134 - DNA, 2478 bp, synthetic construct
  misc_feature 1..2478: note = Description of Artificial Sequence: Synthetic coding sequence
  source 1..2478: mol_type = other DNA
atggagggagccggcggtgccaatgacaaaaagaaaattagctctgagcgccgcaaggagaagagccgggacgcagcacgctcccgacgcagcaaagagagcgaggtcttctacgagcttgctcaccagttgccactgccgcacaacgtctctagccatttggataaggcttcagtgatgcgcctgaccatcagctacttgagggtccgcaagcttttggacgctggcgaccttgatatcgaggacgacatgaaggcccagatgaattgtttctacctcaaggccttagatggcttcgtgatggtcctgacagatgatggcgacatgatttacatctctgacaatgtgaacaagtacatgggccttacgcaattcgaacttactgggcattctgtgttcgattttacccatccatgcgaccatgaagagatgcgggagatgcttacgcatcgaaacggtctcgttaagaaaggcaaggaacaaaatacccaacgcagcttcttcctgcgcatgaagtgtacgttgactagccgcggtcgcaccatgaatatcaaatctgcgacgtggaaagtgttacactgtactggtcatattcacgtttatgataccaactccaatcagccgcagtgtgggtataaaaagccgcctatgacttgtctggttctcatctgcgagccaattcctcacccgagcaatatcgagattcctttagactccaagaccttcctgtcccgtcatagccttgacatgaagttcagctactgcgatgagcgcatcactgaactgatgggttatgaaccagaggagctgctcggccggtccatttacgagtactatcacgcattagactcagatcacctcactaagacgcaccatgatatgtttaccaaagggcaggttactaccggtcaatataggatgttggctaaacgcggtggctacgtgtgggttgagacgcaagcgactgttatttacaacactaaaaattcccagcctcaatgcatcgtatgcgtgaattacgtggtttctggcattatccaacacgatttaattttttcactgcaacaaaccgaatgtgttctgaagccggtggagtccagcgacatgaagatgacccagctgttcacgaaagtggagagtgaagacacttcctccctgtttgataaactgaagaaggaaccagatgcactgaccttgctggcgcctgccgcgggtgacaccattatcagcctggactttggttcgaacgatacggaaactgacgaccagcaactggaggaggtcccactgtacaatgatgtgatgttgccatcccctaatgagaaactgcagaacattaacctcgctatgtccccgcttccaaccgcggaaacaccgaaacctctgagatcaagcgcagaccctgcgctcaaccaagaggttgctctgaagctggaacctaacccagagtccttagaactgagcttcaccatgccgcagatccaagatcagacgcctagtccaagcgacggttccacccgccagagcagcccggaaccgaattctccatcggagtactgtttctatgttgactccgatatggtcaacgaatttaaactggagctggttgagaaactgttcgcggaggacactgaggctaagaacccattcagcacccaagatacggatctcgatctcgaaatgctggcgccttacattcctatggacgacgactttcagctgcgtagcttcgaccagctgtctcctttggagagcagcagcgcatctcctgaaagcgcctcgccacaaagcaccgttactgttttccagcagacccagatccaggagcctaccgctaatgcgactaccactacggccactacggatgaactgaagactgtgacaaaagacaggatggaggacattaagatcctgattgcgtcaccgtcaccaactcacatacataaagaaactacttctgctacgagctcaccttaccgggacactcaatcacgcactgccagcccaaatcgcgccggcaaaggagtcattgagcagaccgagaagagccatccacgctctcctaatgtgctgtcggtcgcactcagtcagcgcaccaccgtgccggaagaggagctgaatccgaaaattttggcgctgcagaacgctcaacgcaagcggaagatggaacatgatggttctctgttccaagcagttggaatcggtaccctgctgcaacagcctgatgatcatgccgctactacgagcttaagctggaagcgtgtgaaaggctgtaagtcctcagaacagaacggtatggagcagaagacgattatccttattccaagcgacctggcctgccgtctcctgggccagagcatggatgagtccgggttgccgcagctgacttcttacgactgcgaagttaatgctccaatccaaggcagccgcaatctactgcaaggagaggaattgctgagagcactggatcaggtgaat

SEQ ID NO: 33135 - DNA, 2478 bp, synthetic construct
  misc_feature 1..2478: note = Description of Artificial Sequence: Synthetic coding sequence
  source 1..2478: mol_type = other DNA
atggagggggcgggtggagccaatgacaaaaagaaaatctctagcgagcgccggaaggaaaaaagtcgggacgctgccaggtccaggcggtccaaagaaagtgaggtgttttacgagttggcccaccagctccctctgcctcacaatgtgtcgtcccatctagacaaggcatcagtaatgagattaaccatttcgtacctgagagtgcggaaattactcgacgcaggcgacctggatatcgaagacgacatgaaagctcagatgaattgcttttatctgaaagcactggatggttttgtgatggtgttaactgacgatggcgatatgatctacatctcggataacgtcaataagtatatgggcttgacgcagttcgaactgaccggccactcagtgtttgactttactcacccgtgtgaccacgaggagatgcgtgaaatgttgacccatcggaatggcctggtgaaaaaaggtaaagagcagaacacacagcgctctttcttcctacgtatgaaatgcaccctgacctcccgaggcagaaccatgaatatcaaaagcgcaacttggaaggtattgcactgcaccggtcacatacatgtgtatgacaccaattcaaatcaaccccagtgcggttataaaaagccacctatgacttgcttagtgctgatctgcgagcctattcctcacccctctaatattgaaatccccctcgattcaaagacttttctctcaaggcacagtctggacatgaaatttagctactgtgacgagaggattaccgaactgatgggatatgagcccgaagagcttctgggaaggtctatatatgagtactatcacgccctagacagcgatcacctgaccaagacccatcacgacatgtttactaagggtcaggtgacaaccggccagtaccgaatgcttgctaaaaggggcggctacgtgtgggtggagacacaggccacagtgatctacaacaccaaaaactcccagccccagtgtatcgtgtgcgtgaattacgtagtgagtgggatcatccagcacgaccttatttttagcctccagcagactgaatgtgtcctcaaacctgtcgagtcttctgacatgaagatgacgcaactgttcacaaaggtcgagagtgaagatacatccagcttgttcgataaactgaagaaagagccagatgcattgactctgctggcacccgccgcaggagataccataatttctctggattttggttcaaacgacacagagactgacgatcaacagctggaggaggtgccactgtataatgacgtgatgttgccttctcctaacgagaaacttcagaatatcaatctcgcaatgagcccactccccactgctgaaactcctaagcctctgcggagcagcgctgaccccgccctcaaccaagaggtggccctgaaactcgaaccaaatccagaatccctcgaactgtcctttaccatgccccaaatccaagaccaaactccctcgccttccgacggcagtacaagacagagctcgcccgagccgaattctccttctgagtactgcttctatgtggactcagatatggtcaacgaattcaagcttgagctggtagagaagctgttcgctgaggacacagaggccaagaatccgttcagtacgcaggacaccgacctggacctcgagatgctggcaccctacatccccatggacgatgacttccaacttagaagcttcgaccagttgtcgcccttggaatcctcgtccgcttctccggagtcagcctcgccacagagcacagtcaccgtgttccaacagacccagatacaagagccaaccgcaaacgctactactaccaccgccactacggacgaattgaagactgtcaccaaagatagaatggaggatattaaaatcctgattgcaagccccagtccaacacatattcataaggagactacgagcgcaacatctagtccatatagggatactcagtctaggaccgcgtcccctaaccgtgctggcaaaggggtgatcgaacagactgaaaagtcgcatcctcgcagtcctaacgtgctctccgtggctctgagccagcgcacaaccgtgccagaggaagaattgaaccctaagattctggctctacagaatgcacagcgaaagagaaagatggaacatgacggctccctatttcaggcagtggggattgggactctcctgcaacagcctgatgatcacgccgctacaacttctctctcttggaaaagagtgaaaggctgcaagtctagcgagcagaatgggatggagcaaaagactatcatcctgattccatccgatctcgcttgcagactccttggacagtcaatggatgagagcggactgccacagctcacatcatatgattgcgaagtgaacgctcccatccagggatcgcggaacctgctgcagggagaggaactgttgagagctcttgaccaagtgaat

SEQ ID NO: 33136 - DNA, 2478 bp, synthetic construct
  misc_feature 1..2478: note = Description of Artificial Sequence: Synthetic coding sequence
  source 1..2478: mol_type = other DNA
atggaaggtgcgggtggtgcgaatgataaaaaaaaaatatcgtcggaacgtcgaaaagaaaaatcgcgagatgcggcgcgatcgcgtcgttcgaaagaatcggaagtattttatgaactagcgcatcaactaccgctaccgcataatgtatcgtcgcatttagataaagcgtcggttatgcgattaacgatatcgtatctacgtgtacgtaaattattagatgcgggtgatctagatatagaagatgatatgaaagcgcaaatgaattgtttttatctaaaagcgttagatggttttgttatggtattaacggatgatggtgatatgatatatatatcggataatgtaaataaatatatgggtttaacgcaatttgaattaacgggtcattcggtatttgattttacgcatccgtgtgatcatgaagaaatgcgtgaaatgctaacgcatcgtaatggtttagttaaaaaaggtaaagaacaaaatacgcaacgttcgttttttttacgtatgaaatgtacgctaacgtcgcgaggtcgtacgatgaatataaaatcggcgacgtggaaagtactacattgtacgggtcatatacatgtatatgatacgaattcgaatcaaccgcaatgtggttataaaaaaccgccgatgacgtgtttagtattaatatgtgaaccgataccgcatccgtcgaatatagaaataccgttagattcgaaaacgtttctatcgcgtcattcgttagatatgaaattttcgtattgtgatgaacgtataacggaattaatgggttatgaaccggaagaattattaggtcgatcgatatatgaatattatcatgcgctagattcggatcatctaacgaaaacgcatcatgatatgtttacgaaaggtcaagtaacgacgggtcaatatcgaatgttagcgaaacgaggtggttatgtatgggtagaaacgcaagcgacggttatatataatacgaaaaattcgcaaccgcaatgtatagtatgtgttaattatgtagtatcgggtataatacaacatgatttaatattttcgctacaacaaacggaatgtgttctaaaaccggtagaatcgtcggatatgaaaatgacgcaattatttacgaaagtagaatcggaagatacgtcgtcgctatttgataaattaaaaaaagaaccggatgcgttaacgctactagcgccggcggcgggtgatacgataatatcgttagattttggttcgaatgatacggaaacggatgatcaacaactagaagaagtaccgttatataatgatgttatgctaccgtcgccgaatgaaaaattacaaaatataaatctagcgatgtcgccgctaccgacggcggaaacgccgaaaccgttacgttcgtcggcggatccggcgctaaatcaagaagttgcgctaaaattagaaccgaatccggaatcgttagaattatcgtttacgatgccgcaaatacaagatcaaacgccgtcgccgtcggatggttcgacgcgacaatcgtcgccggaaccgaattcgccgtcggaatattgtttttatgtagattcggatatggtaaatgaatttaaactagaactagtagaaaaactatttgcggaagatacggaagcgaaaaatccgttttcgacgcaagatacggatctagatctagaaatgttagcgccgtatataccgatggatgatgattttcaactacgatcgtttgatcaattatcgccgctagaatcgtcgtcggcgtcgccggaatcggcgtcgccgcaatcgacggtaacggtatttcaacaaacgcaaatacaagaaccgacggcgaatgcgacgacgacgacggcgacgacggatgaactaaaaacggtaacgaaagatcgtatggaagatataaaaatattaatagcgtcgccgtcgccgacgcatatacataaagaaacgacgtcggcgacgtcgtcgccgtatcgagatacgcaatcgcgtacggcgtcgccgaatcgagcgggtaaaggtgtaatagaacaaacggaaaaatcgcatccgcgttcgccgaatgtactatcggtagcgttatcgcaacgtacgacggtaccggaagaagaattaaatccgaaaatactagcgttacaaaatgcgcaacgtaaacgtaaaatggaacatgatggttcgctatttcaagcggttggtataggtacgttactacaacaaccggatgatcatgcggcgacgacgtcgctatcgtggaaacgagttaaaggttgtaaatcgtcggaacaaaatggtatggaacaaaaaacgataatactaataccgtcggatttagcgtgtcgtttattaggtcaatcgatggatgaatcgggtctaccgcaactaacgtcgtatgattgtgaagtaaatgcgccgatacaaggttcgcgtaatctattacaaggtgaagaactattacgagcgctagatcaagttaat

SEQ ID NO: 33137 - DNA, 486 bp, synthetic construct
  misc_feature 1..486: note = Description of Artificial Sequence: Synthetic coding sequence
  source 1..486: mol_type = other DNA
atgcgcatctccaaaccacaccttcggtccatcagcatccagtgctacctgtgcctcctcctgaactcccacttcctgactgaagcgggaatccatgttttcattctgggctgcttctcagcgggactccctaaaactgaagccaattgggtcaatgtgatctcggacctcaagaagattgaagatctgatccaatctatgcatatcgacgccaccctgtacacggagtcggacgtccacccgtcgtgtaaggtcaccgcaatgaaatgttttctcctcgaactgcaggtgatcagcttggagtccggtgacgccagcatccacgatactgtggagaaccttatcatcctggctaataactcactgtcgtcgaacgggaacgtgaccgagagcggatgcaaggaatgcgaggagctggaagaaaagaatatcaaggaatttttgcagtccttcgtgcatatcgtgcaaatgttcattaacacctca

SEQ ID NO: 33138 - DNA, 486 bp, synthetic construct
  misc_feature 1..486: note = Description of Artificial Sequence: Synthetic coding sequence
  source 1..486: mol_type = other DNA
atgaggatctccaaaccgcacctccggagcatttccatacaatgttacctttgtctcctgttgaactcacactttctgaccgaggctggtatccacgtgttcatactgggctgcttctctgctggacttcctaaaaccgaggcaaactgggttaatgtcatctctgacctgaaaaaaatcgaagatctcattcaatcaatgcatatcgacgccactttgtacacagagtccgatgttcacccttcttgcaaggtgacagctatgaaatgttttctgctggaactgcaggtgatttctctggaatccggggacgcctccattcacgataccgtggaaaatcttattattctcgccaacaactctctgtcctccaacggtaatgtgaccgagagcggctgcaaggaatgtgaggagctggaggagaaaaatatcaaagagttcctgcaaagcttcgtgcacattgttcaaatgttcattaacacgagc

SEQ ID NO: 33139 - DNA, 486 bp, synthetic construct
  misc_feature 1..486: note = Description of Artificial Sequence: Synthetic coding sequence
  source 1..486: mol_type = other DNA
atgagaatctccaagccgcatcttcgatcgatctcgatacaatgttatctttgtctgcttcttaactcccacttcctcactgaggcagggattcacgtgtttatccttggatgcttctcggccgggcttcctaagactgaggctaattgggtgaacgtcatctcagatctcaaaaagattgaggatctgatccagagcatgcacatagacgcaactctgtacactgagtcggatgtccatccctcgtgtaaggtgaccgccatgaaatgttttttgctggagcttcaggtgatcagcctggaatcaggcgatgcctcgattcatgatacggtcgaaaacctgattatccttgctaacaattcactgtcctcaaacggcaatgtgacggaatccggttgtaaagaatgcgaagaactggaggagaaaaacataaaggagtttttgcagtcgtttgttcatattgttcaaatgttcattaacacctcc

SEQ ID NO: 33140 - DNA, 486 bp, synthetic construct
  misc_feature 1..486: note = Description of Artificial Sequence: Synthetic coding sequence
  source 1..486: mol_type = other DNA
atgagaatatccaaaccccaccttcgctccatatccattcagtgctatctctgcctattgcttaactcacactttctaactgaagccgggatccacgtatttatattgggatgcttttcagccggactgcccaaaactgaggccaattgggttaacgtgattagtgatctgaaaaaaatcgaggatttaatacagtctatgcacatcgatgcgactttatatacagagtcagatgtgcatcctagttgcaaggtaacagcaatgaaatgtttcctcctcgaacttcaggtaatatctcttgaatcaggggatgcatctatacatgatactgtggaaaatctcattattctagctaacaactcattatcctctaatgggaatgtcacagagtcgggatgtaaagaatgcgaagaactggaagaaaaaaacatcaaagaattcttacagtcttttgtgcacattgtacaaatgtttatcaatacatca

SEQ ID NO: 33141 - DNA, 486 bp, synthetic construct
  misc_feature 1..486: note = Description of Artificial Sequence: Synthetic coding sequence
  source 1..486: mol_type = other DNA
atgaggatatccaaaccccacctgagatctatctccattcagtgttatctgtgcctcttgctgaactcccacttcttaaccgaagccggcatacacgtttttatcctggggtgcttcagtgctggcctacctaagaccgaagctaactgggttaatgtaatctctgatctgaagaagatagaggatctgatccagagtatgcacatcgatgcaaccctgtatactgagtctgatgtccacccgtcatgtaaggtaacagccatgaagtgctttttactggagcttcaggtaatttcactggagtccggggatgcgtccatacacgataccgtggaaaatttgattattctggctaataacagtctttcctcaaacggaaacgtcaccgaatcaggctgcaaggagtgcgaggagcttgaagagaagaatatcaaagaatttctgcagagctttgtccacatcgtgcaaatgttcatcaacaccagc

SEQ ID NO: 33142 - DNA, 486 bp, synthetic construct
  misc_feature 1..486: note = Description of Artificial Sequence: Synthetic coding sequence
  source 1..486: mol_type = other DNA
atgagaatcagcaaaccgcacctccggagcattagcattcaatgttacttgtgtttgctgctcaatagccacttcttgactgaagctggaatccacgtgttcatcctgggctgctttagcgcggggctcccgaaaactgaggccaattgggtaaatgtcatctccgacctgaaaaagatcgaggacctcatccagagcatgcacatcgatgccaccctgtacaccgagagcgacgtgcacccgtcatgtaaagtcaccgcaatgaagtgctttcttctggagctgcaagtgatttcgctcgagtccggagatgcctcgattcatgacactgtcgagaatctcatcattctggccaacaactcactgagctcgaacggtaacgtcactgaatcgggctgcaaggaatgcgaggagctcgaagagaagaacattaaggaattcctgcagtcgtttgtgcatatcgtgcagatgttcatcaatacgtca

SEQ ID NO: 33143 - DNA, 486 bp, synthetic construct
  misc_feature 1..486: note = Description of Artificial Sequence: Synthetic coding sequence
  source 1..486: mol_type = other DNA
atgcgtatttccaaaccacacctacggtccatttccattcaatgctatctgtgtctgctattaaatagtcatttcttaacagaggctggaatccacgtgtttatcttgggctgcttcagcgcggggctgcccaagacagaggccaattgggtaaatgtcatttcagacttgaagaagatcgaggatctgatacaaagcatgcacattgacgctaccttgtatacagagtccgacgtccacccttcctgcaaagttaccgccatgaagtgttttctgttggaattacaggtgattagcctggagagcggagatgcaagtatccacgacaccgtcgagaacctcataattctggcaaataatagcctaagttccaatggtaatgtgacagaatctgggtgcaaggagtgtgaagaattggaagaaaaaaacattaaagagtttctgcagtcctttgttcacatagtgcagatgttcatcaatacgtcg

SEQ ID NO: 33144 - DNA, 486 bp, synthetic construct
  misc_feature 1..486: note = Description of Artificial Sequence: Synthetic coding sequence
  source 1..486: mol_type = other DNA
atgcgcatctcgaagccgcacttgcggtcgatctccatccagtgctacctgtgtctgctgctcaactcgcacttcctgactgaagctggcatacacgtattcatcctcggttgtttctccgcgggactcccaaagactgaagcgaattgggttaacgtgatcagcgacctcaaaaagattgaggacctcatccaaagcatgcacatagacgccacgttgtataccgaatcggatgtgcatccgagctgcaaagtcactgccatgaagtgctttctgctggaactgcaggtcatctcactcgagagcggcgatgcgtcaattcacgacacggtcgagaatctgatcattctggccaataactccctgtcctcaaacgggaatgtgaccgagtcgggctgcaaggagtgcgaagaacttgaagaaaagaacatcaaagagttccttcaatcctttgtgcatatcgtgcagatgttcatcaacacgtcg

SEQ ID NO: 33145 - DNA, 486 bp, synthetic construct
  misc_feature 1..486: note = Description of Artificial Sequence: Synthetic coding sequence
  source 1..486: mol_type = other DNA
atgagaatatcaaagcctcatcttagaagtatttctatacagtgctatctgtgcctactactgaactctcacttcctgacggaggccgggattcacgtcttcattctcggctgcttctctgcaggactgcccaagactgaagcaaattgggttaacgttatcagcgaccttaagaagattgaggatctgatacagagcatgcatatcgatgctacactgtacacggagagcgatgtgcatcccagctgtaaggttaccgccatgaagtgtttcctgttggagctccaagtgatttcactcgagtcgggggacgcatctatccatgatacagtggagaaccttatcatcttggccaacaatagcctctccagtaacggcaatgtcacagaaagcggatgtaaagagtgtgaggagctggaagagaagaacatcaaggagttcctccaatcttttgtgcatatcgtccagatgttcataaacacaagt

SEQ ID NO: 33146 - DNA, 486 bp, synthetic construct
  misc_feature 1..486: note = Description of Artificial Sequence: Synthetic coding sequence
  source 1..486: mol_type = other DNA
atgagaatctcgaagccgcatctgcgctcgatcagcatacagtgctatctgtgcctgctcctgaattcacattttctcaccgaggccgggatccatgtcttcatccttggttgcttctccgctggcctccccaagaccgaagccaactgggtaaacgtgatttctgatctgaagaaaattgaggacctaattcagtcgatgcatatagacgcaacgctctatacggaatccgacgtgcatcctagctgtaaggtaacggccatgaagtgtttcctgttggaactgcaggtcatctctctggagagcggcgacgcctccatccacgatactgtggagaatttgataattcttgctaacaattcacttagttctaatgggaatgtgactgagtctggttgcaaggagtgcgaggaactagaggagaagaacataaaagagtttctgcaatctttcgtgcacatagtgcaaatgttcattaatactagc

SEQ ID NO: 33147 - DNA, 486 bp, synthetic construct
  misc_feature 1..486: note = Description of Artificial Sequence: Synthetic coding sequence
  source 1..486: mol_type = other DNA
atgcgtatcagcaagcctcatctgcgcagcatcagcattcaatgctatctgtgcctgttgttgaatagccatttcctgacggaggccggcattcacgtgtttattttagggtgctttagtgctgggctgcctaaaacagaagccaattgggtcaatgtgatatcagacctgaagaagatagaagacctcatacaatctatgcatattgatgccacgctgtacacagagtcggacgtgcatccatcttgcaaagtcacagccatgaaatgtttcctcctcgaactgcaggtgatctccctagagtcgggcgatgctagcatacatgataccgtagagaatctaattatcctagctaacaactcgctttcaagtaacggtaatgtgactgaatctggatgcaaggagtgcgaggagttagaagagaaaaacatcaaggagttcttgcagagtttcgtccacatagtccaaatgttcatcaacaccagc

SEQ ID NO: 33148 - DNA, 486 bp, synthetic construct
  misc_feature 1..486: note = Description of Artificial Sequence: Synthetic coding sequence
  source 1..486: mol_type = other DNA
atgaggattagcaaacctcaccttcgttccatctcgattcagtgttacttgtgccttttgctgaattcccattttcttactgaggccggcattcacgtgttcatccttggatgtttctcggccggtttgcctaagaccgaagcaaactgggtgaacgtcatctcggacctgaagaagatcgaagatctcatacagtcaatgcatatagatgccaccttgtacactgaatcggatgtgcacccatcctgtaaagtgactgcaatgaaatgttttctgctggagctgcaagtgatttcccttgaatccggtgatgcgagcattcacgacaccgtggaaaatctcattatcctggcgaacaactcactgtcgagcaacggtaatgtgaccgagtcgggttgtaaggaatgcgaggagcttgaagaaaagaacattaaggagttcctccagtcttttgttcatatcgtgcagatgttcatcaatacctcg

SEQ ID NO: 33149 - DNA, 486 bp, synthetic construct
  misc_feature 1..486: note = Description of Artificial Sequence: Synthetic coding sequence
  source 1..486: mol_type = other DNA
atgcggattagtaagccacatctgaggtccatttctatccaatgctacctatgcctgctactgaactcacattttttaactgaggccggcatccacgtcttcattctcgggtgcttttcggccggactgcctaagaccgaggccaattgggtaaatgttattagtgatttgaagaaaatcgaggacctcatacagagcatgcacatcgacgcgaccctttatacggagtctgacgtgcatccttcttgcaaggtgaccgcaatgaagtgtttcctcctcgaactccaggtgatctccctcgaaagcggtgacgcatctatccacgatacagtcgagaatctgatcattctggcgaataacagtcttagttcgaatggaaatgtgaccgagtctggttgtaaggagtgtgaagaacttgaagagaagaacatcaaagagttcctccaaagtttcgtgcacattgtacaaatgttcattaacaccagc

SEQ ID NO: 33150 - DNA, 486 bp, synthetic construct
  misc_feature 1..486: note = Description of Artificial Sequence: Synthetic coding sequence
  source 1..486: mol_type = other DNA
atgaggataagcaagccgcatttgagaagtatatcaattcagtgctacctctgcctgctcctcaatagccactttcttactgaggctggaattcacgtctttattctaggctgtttctccgcaggattaccaaagactgaagctaactgggtgaacgtcatcagtgacctgaagaaaatcgaagacctgatacagtcaatgcacattgacgccaccctgtacacagagagtgatgtccatcctagctgcaaggttactgctatgaagtgttttctcctggagctgcaggtgatctcccttgaatccggagatgccagtatccatgacaccgtcgagaatctgattatactggccaacaactctctttccagcaacggcaacgttactgagtcaggttgtaaggagtgcgaggagttggaggagaaaaacatcaaggagtttctgcagtcatttgttcacattgtacagatgtttattaatactagc

SEQ ID NO: 33151 - DNA, 486 bp, synthetic construct
  misc_feature 1..486: note = Description of Artificial Sequence: Synthetic coding sequence
  source 1..486: mol_type = other DNA
atgcgaatttccaaaccacacctgcggtctataagtattcagtgttacttgtgtctgctccttaacagccacttcttgacagaggctggtattcatgtctttattctgggatgcttctcagcaggcctgcccaagacagaagctaactgggtcaatgttatctccgacttgaaaaaaattgaggacctgatacagagcatgcacattgatgccaccctctatactgaatccgatgtacatccatcatgtaaagtaactgcaatgaagtgctttctgctcgagttgcaggtgatcagcttggagtctggggacgcctctatccatgacacagtagagaatctgatcatcctggctaacaatagtctcagttctaacggaaacgtgaccgagtctggatgtaaagagtgtgaggaactggaggagaaaaacatcaaagagttcctgcagtcctttgttcacattgtccagatgtttatcaacacgtct

SEQ ID NO: 33152 - DNA, 486 bp, synthetic construct
  misc_feature 1..486: note = Description of Artificial Sequence: Synthetic coding sequence
  source 1..486: mol_type = other DNA
atgcggatcagtaagcctcatttaaggtctatctccatccaatgttatctttgcctgttgttgaactcccattttttgactgaggccgggatccacgtcttcatccttgggtgcttttccgcaggcttacctaagaccgaggctaattgggtgaacgtgatctcagatctcaaaaaaatcgaagatctgatccagtcgatgcatatcgacgcgactctctacaccgagtccgacgttcacccatcctgtaaggtgaccgcaatgaaatgctttttgttagaacttcaggtgattagccttgaatcaggggatgcatcaattcacgacacggtggaaaatctcatcatccttgctaacaacagcctgagctcaaacggcaacgtgaccgagtccggttgcaaagagtgtgaggagttggaagagaagaatattaaagaatttttgcagtccttcgtgcacatcgtccagatgttcatcaacaccagc

SEQ ID NO: 33153 - DNA, 486 bp, synthetic construct
  misc_feature 1..486: note = Description of Artificial Sequence: Synthetic coding sequence
  source 1..486: mol_type = other DNA
atgcggattagcaaaccacatcttcggagcatcagcatccagtgctacctttgcctgctcctgaattcgcacttcttgaccgaggccggaatccacgtgttcatcttgggatgcttcagcgcaggtttgcctaagacggaagcgaactgggttaacgtcatcagcgatctgaagaagatcgaggacctgatccaatcaatgcacatagatgcgaccctgtacactgaatcagatgtgcacccgtcctgtaaggtcaccgccatgaaatgcttcctccttgagctgcaggtgatctcactggaatcgggagatgcgtcaatccatgacacggtggaaaatctgattatcctcgcaaacaatagcctgagctccaacgggaacgttacggagtcgggctgcaaggaatgcgaggagctcgaggaaaagaacattaaggagttcctgcaatcctttgtgcatatcgtccagatgttcataaacacttcg

SEQ ID NO: 33154 - DNA, 486 bp, synthetic construct
  misc_feature 1..486: note = Description of Artificial Sequence: Synthetic coding sequence
  source 1..486: mol_type = other DNA
atgcggatctccaagccgcacttgaggtcgatatccatccagtgctacttgtgcctcctgctaaactcgcatttcttgactgaggccggcatacatgtgttcatccttggctgtttcagtgccggcctgcccaagaccgaagcaaactgggttaacgtgatcagcgacttaaagaagatcgaggatctcattcaaagtatgcatatcgatgccaccttatataccgaaagcgacgttcatccctcatgcaaagttacagcgatgaagtgcttcctgctggagctgcaggttatctccctggaatcgggggacgcctcgatccacgacactgtcgagaatctgatcatcctcgcgaacaactccctcagctcaaacggaaacgtgacagaatcaggatgcaaagagtgtgaagagctggaagagaagaacattaaggagtttctacagtcttttgttcacatcgttcagatgttcatcaatacctcc

SEQ ID NO: 33155 - DNA, 486 bp, synthetic construct
  misc_feature 1..486: note = Description of Artificial Sequence: Synthetic coding sequence
  source 1..486: mol_type = other DNA
atgcggataagcaagcctcatttgcgctctatttcaattcaatgctacctctgtttactccttaatagccattttttaactgaggccggcattcacgtgtttatactggggtgcttttccgctggactgcctaaaactgaggctaactgggtcaatgttattagtgaccttaagaagattgaggatctgatacaaagtatgcacatcgatgccaccctgtatactgaatcagacgttcatccgtcttgtaaagtgactgctatgaaatgcttccttttggaattgcaggtcatctctctggagtccggggatgcatctatacatgataccgttgaaaatctgattattttggcgaataattccttgtctagtaatggtaacgtcacggaaagtggttgtaaggaatgcgaagagctcgaagaaaagaatattaaggagttccttcaatccttcgttcatattgttcaaatgtttattaatacttct

SEQ ID NO: 33156 - DNA, 486 bp, synthetic construct
  misc_feature 1..486: note = Description of Artificial Sequence: Synthetic coding sequence
  source 1..486: mol_type = other DNA
atgcggatctccaagccacatttgcgaagtatatcaatccagtgctacctgtgcctgctgctcaatagccatttcttgactgaagcaggaatacacgtattcatacttggatgcttttctgcagggcttcccaagaccgaagccaactgggtaaacgtcatctctgatctgaagaaaatagaggacttgatccagtctatgcacatcgatgcgacattgtacaccgagtccgatgtgcaccctagctgtaaagtgaccgctatgaagtgctttctgctggaactccaggttatttcacttgaatcgggtgacgccagcatacacgacacagtcgagaatctcattatattggctaataacagcctgtcatcaaacgggaatgtcacagagtcaggctgtaaggagtgcgaggagcttgaagaaaaaaacattaaggagttcttacagtcgtttgtacacatagttcagatgttcattaatacttcc

SEQ ID NO: 33157 - DNA, 486 bp, synthetic construct
  misc_feature 1..486: note = Description of Artificial Sequence: Synthetic coding sequence
  source 1..486: mol_type = other DNA
atgaggatttcaaagccacacctgcggtccatcagcatacaatgttacctttgcctcttactgaacagtcactttttaacagaggcagggattcatgtttttatcctgggatgtttctccgctggcctgcccaaaactgaggctaactgggtgaacgtgatttcggacctcaagaagattgaagacctgatccaatccatgcatatcgacgccaccttgtataccgaatccgacgtccaccctagctgtaaggtcactgccatgaaatgtttcctcctagagttacaggtgatcagccttgagagcggcgatgctagcattcatgacaccgtggaaaatctgatcattctcgccaataactctctcagcagtaatgggaacgtgacagaaagcggttgcaaagaatgcgaggaactggaagaaaagaatatcaaggaatttcttcagtcattcgtgcatatcgtccagatgtttattaatacaagc

SEQ ID NO: 33158 - DNA, 486 bp, synthetic construct
  misc_feature 1..486: note = Description of Artificial Sequence: Synthetic coding sequence
  source 1..486: mol_type = other DNA
atgaggatatctaagccacacctacgcagtatatctattcagtgctacctatgcctgctcttgaacagccactttttgaccgaagccggtatccacgtgttcatactcgggtgtttctcggccggcttacctaagacagaagccaactgggtgaacgtgatctcagatttaaaaaaaattgaggatctcatccagtctatgcacatagatgccacactctacacagagtctgatgtccacccatcctgtaaagtcactgccatgaagtgttttctgctggagctgcaagtgatctcgctagagtctggagatgcatcaatccatgacacagtcgagaatctgattatcttagcaaataattccctgagttcaaatggcaacgtgacagaatcaggttgcaaggagtgtgaggagctcgaggaaaaaaacatcaaggaattcctgcagagcttcgtacatattgtacagatgtttattaatacctct

SEQ ID NO: 33159 - DNA, 486 bp, synthetic construct
  misc_feature 1..486: note = Description of Artificial Sequence: Synthetic coding sequence
  source 1..486: mol_type = other DNA
atgaggatttccaaaccacatcttagatcgatctcaatccagtgctacctgtgccttctgctgaacagtcatttccttaccgaggcgggaatacacgtgttcatcctcggatgtttctcggcagggctgcccaaaaccgaagccaattgggtgaacgtgatcagcgatctgaagaagatcgaggacctgatccagtcgatgcacatcgatgcgactttgtacacggaatcagacgtgcacccgagctgcaaggtcactgcgatgaagtgtttcctccttgaactgcaagtaatatccctcgagtctggtgacgcctcgatccatgacactgttgaaaacctgatcattctcgctaacaactcattgtcctcaaacggcaatgtgaccgaatcaggctgcaaggagtgcgaagaacttgaagagaagaacatcaaggagtttttgcagagcttcgtgcacatcgtgcaaatgtttatcaataccagc

SEQ ID NO: 33160 - DNA, 486 bp, synthetic construct; identical to SEQ ID NO: 33158
  misc_feature 1..486: note = Description of Artificial Sequence: Synthetic coding sequence
  source 1..486: mol_type = other DNA

SEQ ID NO: 33161 - DNA, 486 bp, synthetic construct
  misc_feature 1..486: note = Description of Artificial Sequence: Synthetic coding sequence
  source 1..486: mol_type = other DNA
atgcgcatttccaaaccacatctccggtcaataagcatacagtgttacctctgccttctgcttaattcgcactttcttaccgaagcaggcattcatgtgtttatcttggggtgtttttcagctggcctgccaaaaaccgaggccaactgggtgaacgtgatctcagacctgaagaaaattgaagatctcatccaatcgatgcatatagacgcaaccctttacactgaaagcgatgtgcacccatcctgcaaagttaccgctatgaagtgttttcttcttgaacttcaggtcatttcgcttgagtcgggagacgcatccattcacgataccgtcgaaaacctgatcattttggccaacaactctctctcatcaaatggtaacgtcaccgagtcgggctgtaaggagtgcgaagaactggaagaaaagaacataaaggagttcctccagtcctttgtgcatattgtccaaatgtttatcaatacgtcc

SEQ ID NO: 33162 - DNA, 486 bp, synthetic construct
  misc_feature 1..486: note = Description of Artificial Sequence: Synthetic coding sequence
  source 1..486: mol_type = other DNA
atgcgtatcagcaagccacatctgaggagtatcagtatccagtgctatctctgcctgctcttgaactcccacttcctgacggaagccggcattcacgtgttcattctgggctgctttagtgctggccttcccaagaccgaggcgaactgggtgaacgtcatttctgacttgaagaaaattgaggatctgatccaaagcatgcacatagacgccaccctgtatacggagtccgacgtacatccatcctgcaaagtcaccgctatgaagtgcttcctcctcgagctacaagtgatttctctcgagagtggtgatgccagcatccatgacaccgtcgaaaatctcatcatcctggcgaataactcgctgtcgtccaacggcaacgtcaccgagagcggttgtaaggaatgcgaagagctcgaggaaaagaacattaaggaattccttcagtccttcgtccacatagtacaaatgttcataaacaccagc

SEQ ID NO: 33163 - DNA, 486 bp, synthetic construct
  misc_feature 1..486: note = Description of Artificial Sequence: Synthetic coding sequence
  source 1..486: mol_type = other DNA
atgagaatttccaagcctcacctgcggtcgatttccattcaatgctacctctgccttctgttgaactcccatttcttgacggaggcaggtatacacgtctttatcctcggatgcttttccgcaggactccctaagaccgaggccaattgggtgaatgtgatctcagacttgaaaaagattgaggacctgattcagtcgatgcatatcgatgcaactctgtacaccgagtcggatgtgcatccatcctgtaaagtcacggcaatgaaatgttttcttttggaactgcaagtgatttcacttgaatccggggacgcaagcatccatgataccgtggagaacctgattatactcgcgaacaactcgctgtcgagcaacggaaacgtcactgagtccggctgtaaggagtgcgaggaattggaagagaagaatatcaaagaattcctgcaatcttttgtgcatatagttcaaatgttcatcaacacctcc

SEQ ID NO: 33164 - DNA, 486 bp, synthetic construct
  misc_feature 1..486: note = Description of Artificial Sequence: Synthetic coding sequence
  source 1..486: mol_type = other DNA
atgagaatatccaaacctcacctgagatcaatctcgatccagtgttacctttgtctcctgcttaattcgcactttctgactgaagcaggtattcatgtgttcattcttgggtgtttttcagcaggactcccaaaaacggaagccaactgggtgaatgtcatctcggacctgaagaagatcgaggatctgatccaatctatgcatattgatgccactctttacaccgaaagcgacgtgcacccatcgtgcaaggtcactgcaatgaagtgtttcttgctcgaattgcaggtgatctccctcgagtcgggtgatgcatcaattcatgatacggtcgagaatttgattattcttgcaaacaattcgcttagctccaacggtaacgtcaccgaatcgggctgcaaggaatgtgaagaactggaagagaagaacatcaaggaatttcttcaaagttttgtgcatatcgtgcaaatgttcatcaacactagc

SEQ ID NO: 33165 - DNA, 486 bp, synthetic construct
  misc_feature 1..486: note = Description of Artificial Sequence: Synthetic coding sequence
  source 1..486: mol_type = other DNA
atgcggatcagcaagcctcacctgcgctcgatctccatacaatgttacctttgtctcctgctgaactcccatttccttaccgaagctgggattcatgtctttattctgggatgtttctcagcagggctgcctaaaacggaggccaactgggtcaacgttatcagcgatctgaagaagatcgaagatcttatccaatccatgcatattgacgccaccctttacactgagtcagatgtgcatccgtcgtgcaaggttaccgcgatgaagtgttttctgctggaacttcaggtgatatccctggagtcgggcgatgcctcgattcatgacaccgttgagaatttgattatactcgccaataactcgctttcgagcaatggaaatgtgaccgaatccggatgtaaggaatgcgaagagctcgaggaaaagaacattaaggagtttctgcagagctttgtgcacattgtccagatgtttatcaacactagc

SEQ ID NO: 33166 - DNA, 486 bp, synthetic construct
  misc_feature 1..486: note = Description of Artificial Sequence: Synthetic coding sequence
  source 1..486: mol_type = other DNA
atgagaatctccaaaccacacctgaggtccatctccatccagtgctatctgtgcctgcttctgaacagtcattttttgaccgaagccggcattcatgtctttattttgggttgtttcagtgccggcctcccgaaaacagaggctaactgggtgaacgtgatatcagatcttaaaaagattgaggacttgattcagtcaatgcacattgacgccactctgtatacagagagcgatgttcaccccagttgtaaggtaaccgctatgaaatgtttcctgctcgaactgcaagttatctcactagaaagtggggatgccagcatacatgatacagtcgagaatctaattatcctcgcgaataatagcctatccagcaatggcaacgtgacggagagcggatgcaaggaatgcgaggagctggaggaaaagaatattaaggagttcctccaatccttcgtgcatatcgtgcagatgttcatcaatacctcc

SEQ ID NO: 33167 - DNA, 486 bp, synthetic construct
  misc_feature 1..486: note = Description of Artificial Sequence: Synthetic coding sequence
  source 1..486: mol_type = other DNA
atgcggatttccaagccacatctcagatcgatatcaatccaatgttacctctgtctgctgttgaactcacatttcttgacggaggcaggaatccacgtctttattcttggatgtttttccgccggactgccaaagactgaggcaaattgggtgaacgtgattagcgatctgaaaaagattgaagatctcattcaatcgatgcatattgatgcaaccctttacactgaaagcgacgtccacccttcgtgcaaggtaaccgctatgaagtgtttccttctggaacttcaggtgatttcgcttgagtcgggggatgcaagcatccatgacacggtcgagaatctgatcatcctggcgaacaactccctgtctagcaatggtaacgtgactgaaagtggatgcaaagaatgcgaggaactggaggaaaagaacattaaggagttcctgcagagctttgtgcacatagtacaaatgtttatcaacacttcc

SEQ ID NO: 33168 - DNA, 486 bp, synthetic construct
  misc_feature 1..486: note = Description of Artificial Sequence: Synthetic coding sequence
  source 1..486: mol_type = other DNA
atgaggatttctaagccccatctgcggtcaatttcaattcaatgctatctctgcctcctcctcaactctcacttcctcaccgaagcaggcattcatgtattcatactcgggtgtttctccgccgggctgcctaagacagaagctaactgggtcaatgtaatctccgatctcaaaaaaatagaggatctcatccagtccatgcacattgacgccacactgtacacggagtccgatgttcacccgagttgcaaggttacggctatgaagtgttttctcctggagctacaggtaatctccctggagagtggagacgcttctatacatgatacagtcgaaaacctgattatccttgcaaataatagcctgagttcaaacggcaatgtaacagagagcggctgtaaggaatgtgaggaactcgaggagaaaaacattaaagaattcctgcaaagcttcgtacacattgttcagatgttcatcaatacttcc

SEQ ID NO: 33169 - DNA, 486 bp, synthetic construct
  misc_feature 1..486: note = Description of Artificial Sequence: Synthetic coding sequence
  source 1..486: mol_type = other DNA
atgagaatttccaagccccatctgaggagcattagcattcaatgctatctgtgtctgttgctaaatagccatttccttacagaagccggcattcatgtgtttatcctcgggtgtttcagtgccggtctgcctaaaacagaggctaactgggtgaatgtgatcagcgacctgaagaaaatcgaagatctgatccagtcaatgcatatcgatgcgaccctctatacggaatctgatgtgcaccctagctgtaaagtgactgccatgaagtgttttctgttggaactccaagtgatctctttagagtccggagatgccagtatccacgataccgtagaaaatctgatcatactggccaataacagcctatctagcaacggaaacgtcaccgagagcggctgtaaggagtgtgaagagctagaggaaaaaaacattaaggagttcctgcagtctttcgtgcatatagtgcagatgtttattaatacaagt

SEQ ID NO: 33170 - DNA, 486 bp, synthetic construct
  misc_feature 1..486: note = Description of Artificial Sequence: Synthetic coding sequence
  source 1..486: mol_type = other DNA
atgcggattagtaaaccccatctgagaagcattagcatccagtgctacctttgtctcctgcttaactcccacttccttaccgaagctggtattcacgtctttatcctgggatgttttagcgcagggcttcctaaaacggaggcgaattgggtgaatgtgatctcggaccttaagaagatagaagatctcatacaatccatgcacatagatgccaccctctacaccgagtcagacgtgcatccgtcctgcaaagtgactgcaatgaagtgttttttgctcgaacttcaggtcatttccctcgaatcaggcgatgcctccattcatgatacggttgagaatctgatcatacttgctaacaactccctttcgtcgaacggaaacgtgactgaaagtggatgcaaggaatgtgaagaactggaggaaaagaacatcaaggaatttctgcaatcgtttgtccatattgtgcaaatgtttatcaacacgtcg

SEQ ID NO: 33171 - DNA, 486 bp, synthetic construct
  misc_feature 1..486: note = Description of Artificial Sequence: Synthetic coding sequence
  source 1..486: mol_type = other DNA
atgcgtatatcgaagcctcatctgagatctatttccatccaatgctatctgtgtctgctgcttaactcgcactttttgactgaagcaggaatccatgtgtttatactgggttgtttcagcgcaggactgcccaagactgaagcgaattgggttaacgtgatctcggatctcaagaaaatcgaggacctcattcaaagcatgcacatcgacgcaaccctttacaccgaaagtgatgtccatccaagctgtaaggtcactgctatgaagtgctttcttcttgagcttcaggtaatctcactcgagtcaggggatgcaagcatccatgacacggtggaaaatctgattattctggccaacaactccctgtcaagtaatggtaatgtgaccgaatccggatgtaaagaatgcgaagagttggaggaaaagaacataaaagagtttctccagagctttgtccacattgtgcaaatgttcattaacacctcg

SEQ ID NO: 33172 - DNA, 486 bp, synthetic construct
  misc_feature 1..486: note = Description of Artificial Sequence: Synthetic coding sequence
  source 1..486: mol_type = other DNA
atgcggatcagcaagcctcatttacggagcatcagcattcagtgctacctctgcctcctgctgaacagccactttctaaccgaagcaggtatacacgtgtttatcctcggctgttttagtgccgggctccccaagaccgaggctaattgggtgaatgtcatctcagatctcaaaaagattgaggacctcattcagtcaatgcacatagacgcaactctatatacagagagcgacgtgcatccgtcatgcaaagtaaccgccatgaagtgcttcttactggagctgcaggtgataagcctggagtcaggagatgcgagtatacacgacactgtagagaatttgatcatcctggcgaataattcgctgtccagcaatgggaacgttacagaaagcggctgtaaggaatgtgaggaactggaagaaaagaacattaaggaattcctgcagtccttcgtgcacatagtgcagatgtttattaacacatcc

SEQ ID NO: 33173 - DNA, 486 bp, synthetic construct
  misc_feature 1..486: note = Description of Artificial Sequence: Synthetic coding sequence
  source 1..486: mol_type = other DNA
atgaggatctccaaacctcatctgaggtcaatctccatccagtgctacctgtgcctgctgctcaacagccatttcctcacagaggcaggaatccacgtgttcattctgggttgcttttccgcaggacttcctaaaaccgaagctaattgggtgaatgtcataagcgacctgaagaagatcgaagatctgattcagagcatgcacattgacgcaactctgtatacagagtccgacgtccatccaagttgcaaggtaactgccatgaagtgctttctgttggagctccaagtgatctcacttgagagcggtgatgcctcaattcacgacacagtcgaaaatctgataatcctcgctaacaacagtctgtcctcaaacggtaatgtgacagagtcaggctgtaaggagtgcgaggagctcgaggagaagaacattaaagaattcctgcagtccttcgtgcacatcgtccaaatgtttattaacacctca

SEQ ID NO: 33174 - DNA, 486 bp, synthetic construct
  misc_feature 1..486: note = Description of Artificial Sequence: Synthetic coding sequence
  source 1..486: mol_type = other DNA
atgcgcatttcaaagccacacctgaggtccatttcaattcaatgttatctgtgtctcctgctgaacagccatttcctgacagaggcaggtattcacgtgtttatcttaggttgcttcagcgcagggcttcctaaaaccgaggccaactgggtgaacgtcatcagtgacttgaagaaaatcgaagatctgatccaatcaatgcacatcgatgcaacattatatacggaaagcgatgtgcacccatcttgtaaggttaccgctatgaagtgcttcttgcttgagctccaggtgatctctcttgaatccggcgatgcctccatccacgacactgtcgaaaacctgatcattttggccaacaacagtctgagctcaaacgggaatgtgactgaatccggctgcaaggagtgcgaggagctagaagaaaaaaatatcaaagaattcctccaaagcttcgttcacatcgtccagatgttcatcaatacatca

SEQ ID NO: 33175 - DNA, 486 bp, synthetic construct
  misc_feature 1..486: note = Description of Artificial Sequence: Synthetic coding sequence
  source 1..486: mol_type = other DNA
atgcgcatctctaagccacatctcaggtccatctccattcaatgctacctctgcctccttctgaactcacatttcctcaccgaagctggcattcacgtgtttatcttgggctgtttctctgcgggtctccccaagaccgaggctaactgggttaatgtcatttcagacttgaagaagatcgaagacctcatccaaagtatgcacatcgacgcaacgctttacacagagtcagacgtgcacccctcttgcaaagtgacagctatgaagtgcttcctgctggagctgcaagttatttccctggaaagtggcgatgcttcaatccatgacactgtggagaacctcatcatcttggcaaacaatagcctcagctccaatggaaacgtgactgaatctggctgtaaggaatgcgaggagttggaggagaagaatatcaaggaatttcttcagagttttgtccacatcgtgcagatgtttatcaatacttct

SEQ ID NO: 33176 - DNA, 486 bp, synthetic construct
  misc_feature 1..486: note = Description of Artificial Sequence: Synthetic coding sequence
  source 1..486: mol_type = other DNA
atgagaatctcgaagccacacctgcggtccatctccatccagtgttacctctgcctgttgctgaactcccacttcctgactgaagcaggaatccacgtgttcatcctcggatgcttctccgccggcctgcctaagaccgaagctaattgggtgaacgtgatcagcgatctcaagaaaatcgaggacctgatccagtcaatgcatatcgacgcaacgctgtacaccgaatccgacgtgcacccgagctgtaaggtgactgccatgaagtgtttcctgctggagctccaagtgatctcgctcgaatcaggcgacgccagcatccacgacaccgtcgagaacctcatcatcctggcaaacaactcactgtcctcgaacggaaacgtgactgaaagcggctgcaaggaatgcgaggaactggaggagaaaaacattaaagagttccttcaatcattcgtccatatcgtccagatgttcatcaatacgtcc

SEQ ID NO: 33177 - DNA, 486 bp, synthetic construct
  misc_feature 1..486: note = Description of Artificial Sequence: Synthetic coding sequence
  source 1..486: mol_type = other DNA
atgcgcatctctaaaccccacttgcgctctatttccatccaatgttatttgtgcctcctcctgaactctcatttcttgacggaagccggtatccacgtcttcattctgggctgtttcagcgccggtttgcctaagacggaagcgaactgggtaaatgtaatttccgacctcaagaagatagaagatttgatccagagcatgcacatcgacgctacgttgtatacggaaagtgacgtccacccgtcctgcaaggtgacggccatgaaatgtttcctgttggagttgcaggttatctcattagagagcggggatgcgtctatacacgataccgtggaaaatctgatcattttggcgaacaactctctgtcgtccaatggaaacgtcacagagagcggatgtaaggaatgcgaggaattggaagaaaagaatataaaggagttcctccagtcgttcgttcatattgtccaaatgtttatcaatactagc

SEQ ID NO: 33178 - DNA, 486 bp, synthetic construct
  misc_feature 1..486: note = Description of Artificial Sequence: Synthetic coding sequence
  source 1..486: mol_type = other DNA
atgcgaatctccaaacctcacctgcggagtataagtatccaatgctatctctgcttactgctaaacagccacttcctcactgaagctggcatacacgtgttcattctgggctgtttttccgctgggttacccaaaacagaagccaattgggtcaacgttatctccgacctgaagaagatagaggacctgattcagtccatgcatattgatgccacattatacaccgaatcagacgtccaccccagctgcaaggtgaccgccatgaagtgtttcctgcttgaactgcaggtgatctctcttgaaagtggcgacgcctctatccatgacaccgtcgagaatctaatcatcctggccaacaacagtctaagctcaaatggcaatgttacagagtcagggtgcaaagaatgtgaggagttggaggaaaagaacatcaaggaattcctgcagtcatttgtacatatcgttcagatgttcatcaatacctct

SEQ ID NO: 33179 - DNA, 486 bp, synthetic construct
  misc_feature 1..486: note = Description of Artificial Sequence: Synthetic coding sequence
  source 1..486: mol_type = other DNA
atgaggataagtaaaccgcacctgagatccatttcaatccaatgttacttgtgtctgctcctgaattcccactttctgacagaggctgggatccacgtattcattctgggctgttttagcgctgggttgccaaagaccgaggccaattgggtgaacgtgataagtgatctgaagaaaattgaggacctaatccaatcaatgcatatcgacgcaaccctgtacacagagagcgatgtgcacccgtcttgcaaggtgaccgctatgaagtgttttctgctggaattgcaagttattagcctggaatcaggggacgcatcgattcacgacaccgtggagaatctaatcatccttgcaaataactcgctcagcagtaacggtaacgtgacggagtctggctgtaaggaatgtgaagagctcgaggagaaaaatatcaaggagttcctgcagagctttgtccacatcgtccagatgttcatcaatacgagt

SEQ ID NO: 33180 - DNA, 486 bp, synthetic construct
  misc_feature 1..486: note = Description of Artificial Sequence: Synthetic coding sequence
  source 1..486: mol_type = other DNA
atgagaatctccaagcctcacttgcgctcgatctcgatccagtgctacctctgtctgctgctgaactcacatttcctcaccgaagccggcatccatgtctttatcctgggatgcttttctgccgggttgccaaagactgaggccaactgggtcaacgttattagcgatctgaaaaagatcgaggacctcatacagtcaatgcacattgacgcgaccctttacaccgagtctgacgtgcacccgtcttgtaaagtgaccgcgatgaagtgcttccttttggaactgcaagtgatcagcctggaatcaggagatgctagcattcacgacactgtggaaaatctcatcatcctggcaaataactcgctgtcgtcgaatggaaacgtgactgaatccggttgcaaggagtgcgaggagttggaggaaaagaacatcaaagagttcttgcagtccttcgtgcatatcgtccaaatgttcataaacaccagc

SEQ ID NO: 33181 - DNA, 486 bp, synthetic construct
  misc_feature 1..486: note = Description of Artificial Sequence: Synthetic coding sequence
  source 1..486: mol_type = other DNA
atgagaatctccaaaccacacttgcggtctatttccatccagtgttacctgtgccttctgctgaattcgcactttctgaccgaggccggcattcatgtctttatacttggttgtttttcggcaggacttcctaagacggaagctaactgggtgaatgtgatctccgatctcaagaagatcgaagatttgatacaaagcatgcatattgatgcaactctgtacactgaatccgacgtccatccttcgtgtaaggtgaccgcgatgaagtgttttcttctggaactgcaggtgatctcgcttgaatcgggagatgcctctattcacgatactgtcgagaatctgattatcttggcaaacaatagccttagcagcaacggtaacgtgaccgaaagcggttgtaaggagtgcgaggaactcgaagaaaagaacatcaaagaatttcttcaatcgttcgtgcatatagtacagatgttcatcaacacctcg

SEQ ID NO: 33182 - DNA, 486 bp, synthetic construct
  misc_feature 1..486: note = Description of Artificial Sequence: Synthetic coding sequence
  source 1..486: mol_type = other DNA
atgcgcatcagcaagccgcacttgagatcgattagcatccagtgctacctctgcttgctcctcaactcgcacttcttgactgaagccggcattcacgtgtttatcctgggatgtttcagcgccggactgccgaaaacggaagctaactgggtgaacgtcatcagtgacctgaaaaagatagaggatctgatccaatccatgcatattgatgccaccctgtacaccgaatcggacgtccatccatcatgcaaggtgaccgcaatgaagtgctttttgctcgagctgcaagtgatcagcctggaatcaggagatgcgagcatccatgacaccgtggagaatcttatcatcctggccaacaactcattgtcgagcaatggtaacgtgactgaatcaggatgcaaggagtgtgaggagcttgaggagaaaaacatcaaggaattcctgcagagctttgtacatatcgttcaaatgttcatcaatacgtcc

SEQ ID NO: 33183 - DNA, 486 bp, synthetic construct
  misc_feature 1..486: note = Description of Artificial Sequence: Synthetic coding sequence
  source 1..486: mol_type = other DNA
atgcggatctccaaaccacatctgagatccatcagcatccaatgctacttgtgtctcctccttaacagccacttccttaccgaagcaggaatacatgtgtttatcctgggatgcttctccgcaggactgccaaagactgaggccaattgggtgaacgtgatctcagacctgaaaaagatcgaggacttgattcaatccatgcacatcgatgccaccctgtacacggaatccgacgtgcacccgtcctgtaaagtgactgcaatgaaatgcttcttgctggagctgcaggtgatttcactggaaagcggcgatgccagcatccatgataccgtagaaaacctcatcatcctggcgaacaattccttgagttccaatggtaacgtgacggaatcgggctgcaaggagtgcgaggagctggaagaaaagaacatcaaggaatttctccagagcttcgtgcacatcgtgcagatgttcatcaacacttca

SEQ ID NO: 33184 - DNA, 486 bp, synthetic construct
  misc_feature 1..486: note = Description of Artificial Sequence: Synthetic coding sequence
  source 1..486: mol_type = other DNA
atgcggatcagcaagccacatttgaggtcgatctcgatccaatgctatctgtgcctgcttctgaactcgcactttctgactgaagcgggaatccatgtgtttatcctgggatgtttcagcgccggactgccgaaaaccgaggctaattgggtgaacgttatctcagacttgaaaaagatcgaggatctgatccagtccatgcatatcgacgcaaccctctacaccgaatccgacgtccacccatcatgcaaagtgaccgctatgaagtgtttcctcttggagttgcaggtcatttcactggagtcaggcgacgcctccattcatgataccgtggagaatctcatcattctcgctaacaattcactgtcgagcaacggaaacgtgaccgagagcggatgcaaggagtgcgaagagctcgaagagaaaaacatcaaggaatttctgcagagcttcgtgcacatcgtccagatgttcatcaacaccagc

SEQ ID NO: 33185 - DNA, 486 bp, synthetic construct
  misc_feature 1..486: note = Description of Artificial Sequence: Synthetic coding sequence
  source 1..486: mol_type = other DNA
atgagaatttctaagccacatctcagatcgatctcgatccaatgttacctttgtctccttctcaactcacatttccttaccgaagcagggattcatgtgtttattctgggttgttttagcgcaggcctgccaaagactgaagccaactgggtcaacgtgatctccgatctgaaaaagatagaagatctgatccagagcatgcatattgatgcaactctttacaccgagtccgatgtgcatccctcctgtaaggtgactgcgatgaagtgctttcttctggagctccaagtcatttccctcgaatccggggatgcatcgatacacgacactgtggagaacctgatcattctggcaaacaattcgttgagctcaaacggcaacgtgactgaaagcggatgtaaggagtgcgaagaacttgaagaaaagaatatcaaagaattcctgcaatcctttgtccatatcgtgcagatgttcattaacacttcc

SEQ ID NO: 33186 - DNA, 486 bp, synthetic construct
  misc_feature 1..486: note = Description of Artificial Sequence: Synthetic coding sequence
  source 1..486: mol_type = other DNA
atgcgcatttccaagccccacttgagatccatcagcattcaatgttacctctgcttgctgctgaactcgcattttctcaccgaggcaggcatccacgtattcatcctgggttgcttcagcgcagggctgcctaagactgaggcgaattgggtgaatgtcatctcagatctcaagaagatagaggaccttattcagagcatgcacatagatgccactctctacacggaatcggacgtccatccgtcatgcaaagttaccgctatgaaatgcttcctcctcgaacttcaagtcatctcactggagtcgggggacgcctcaatccacgacaccgtggaaaacctgataatccttgcgaacaattcgctgagttccaacggaaacgtgactgaatccggatgcaaggaatgtgaggagctggaagaaaagaacatcaaggaatttctccagtcgttcgtgcatatcgtgcagatgttcatcaatacctca

SEQ ID NO: 33187 - DNA, 486 bp, synthetic construct
  misc_feature 1..486: note = Description of Artificial Sequence: Synthetic coding sequence
  source 1..486: mol_type = other DNA
atgcgcatctccaaaccgcacctccgttccatctctattcaatgctatctctgcctgttgttaaattcacatttcctcactgaagcaggcattcatgtgttcattttaggctgtttttctgccggactgcctaagactgaggcgaattgggttaatgttattagtgacctcaagaaaatcgaagatttgattcagagtatgcacattgatgccaccctctacactgagagcgacgttcacccttcttgcaaggtcacggctatgaagtgcttcctccttgaattgcaggtcatctccctggaaagtggcgacgcgtcgattcatgataccgttgaaaacctgattatcctggctaacaattccttgtcgtctaatgggaacgttacagagtcagggtgtaaagagtgcgaggagcttgaggagaagaacataaaagagtttctccaatctttcgtgcacattgttcagatgttcatcaacaccagt

SEQ ID NO: 33188 - DNA, 486 bp, synthetic construct
  misc_feature 1..486: note = Description of Artificial Sequence: Synthetic coding sequence
  source 1..486: mol_type = other DNA
atgagaatttctaagccccacttaagatcaatctctattcagtgttacctgtgcctgctgctgaatagccactttctgacagaggccggaattcatgtgtttatcctagggtgcttcagtgctggtctgccaaagaccgaggcaaactgggtaaatgtcatctccgatctgaagaaaatcgaagatctgatccaatccatgcatatcgacgctactctatacacagaatctgatgttcatccgtcctgtaaggtgaccgccatgaagtgcttccttctagagctgcaggtgatatccttggaatctggcgatgcatctatacacgataccgtcgaaaacctgatcattttggctaataactctttgtcttcaaatggaaatgttactgaatccggctgcaaggaatgtgaggaactcgaggagaagaacatcaaggagtttctgcagtcctttgtgcatatagtgcagatgttcatcaacacctcc

SEQ ID NO: 33189 - DNA, 486 bp, synthetic construct
  misc_feature 1..486: note = Description of Artificial Sequence: Synthetic coding sequence
  source 1..486: mol_type = other DNA
atgcgaatttcaaaaccacatcttcggagcatttccatccaatgttacctttgtctgcttcttaacagccacttccttaccgaagcaggcattcatgtgtttatccttggatgtttttcagccggactccccaagactgaagcaaactgggtgaacgtgattagcgacctcaaaaagatagaagatctcatccagagcatgcacattgatgcaactctttacactgaatcagacgtccatccttcttgcaaggttaccgctatgaagtgctttctgctcgaacttcaagtcatatccctggaatcgggagacgcgtcgattcacgataccgtggagaatctcattatactggctaacaattcgctctcatccaacggtaacgtgactgaaagcggctgcaaagagtgtgaagagcttgaggagaagaacattaaggagttcttgcaatcgttcgtccatatcgtgcagatgtttatcaatacctcg

SEQ ID NO: 33190 - DNA, 486 bp, synthetic construct
  misc_feature 1..486: note = Description of Artificial Sequence: Synthetic coding sequence
  source 1..486: mol_type = other DNA
atgcggatctcaaagccgcacttgaggagcatatcaatccaatgctatctctgtctgctcctgaacagccatttcctgacagaggccgggatccacgtcttcatattgggctgtttcagtgctgggcttccaaagacggaggccaactgggtgaatgtcatctctgacctgaagaaaatcgaggacctgattcagtctatgcacattgacgccaccctgtacaccgaatctgacgtccacccatcatgtaaggtcacagctatgaagtgcttcttattagaattgcaggttatctctttggagtctggcgacgcatcaattcacgatacagttgaaaatttaattattctcgctaacaactccctgagttcaaacgggaacgtgactgaatcaggctgtaaggagtgtgaagaactggaagagaagaacattaaggaatttctgcaaagtttcgtccacatcgtgcagatgttcattaacaccagc

SEQ ID NO: 33191 - DNA, 486 bp, synthetic construct
  misc_feature 1..486: note = Description of Artificial Sequence: Synthetic coding sequence
  source 1..486: mol_type = other DNA
atgcggatctccaaaccacacctgcggtccatctcgatccagtgctacctgtgtctgcttctcaacagccacttccttaccgaagccggaatccacgtgtttatcctcggatgcttctcggctgggctgcctaagaccgaggcgaactgggtcaatgtgataagcgacctgaaaaagatcgaagatctgatccaatcgatgcacatcgacgcaaccctgtacacggagtcagatgtccacccgtcatgtaaggtgactgccatgaagtgcttcctgctcgaacttcaagtgatctccctcgagagtggcgacgcaagcatccacgatactgtggagaatcttatcattctggcaaacaactccttgagctctaatggcaacgtaaccgaatcgggatgcaaagagtgcgaagaactcgaggaaaagaacatcaaggaatttctccagtcctttgtccacatcgtccagatgttcattaacacgtcc

SEQ ID NO: 33192 - DNA, 486 bp, synthetic construct
  misc_feature 1..486: note = Description of Artificial Sequence: Synthetic coding sequence
  source 1..486: mol_type = other DNA
atgcgtatctccaagccacacctcaggtctatatcaattcaatgttacctgtgcctgctgcttaacagtcacttcttaaccgaggcaggaatccatgtttttattctggggtgttttagcgcgggcttacccaaaacggaggccaactgggtaaatgttatttccgatcttaagaaaatcgaggatcttatccagtccatgcacattgacgctacattatatacagagtcagacgttcacccgtcctgtaaggtgacggctatgaagtgcttcctgctggagctgcaggtgatcagtctggaatcaggagacgcctccatacatgacactgttgaaaatctgattatattagccaataatagtctcagcagtaatgggaacgtaacagaatcgggctgtaaagagtgcgaggagttggaggagaaaaacattaaagagttcttacaaagcttcgtgcacatagttcagatgtttataaacacttct

SEQ ID NO: 33193 - DNA, 486 bp, synthetic construct
  misc_feature 1..486: note = Description of Artificial Sequence: Synthetic coding sequence
  source 1..486: mol_type = other DNA
atgagaataagtaaaccacatcttagatcaatttcaatacaatgttatttatgtttacttttaaattcacatttccttacagaagctggaatacatgtatttattttaggatgtttttctgctggtttaccaaaaacagaagctaattgggtaaatgtcatttctgatttaaaaaaaattgaagatttaatacaatctatgcatattgatgctacattgtatacagaatctgatgtacatccaagttgtaaagttacagcaatgaaatgttttttgttagaattacaagtaatttctttagaatcaggagatgcatcaatacatgatactgtcgaaaatttaattattcttgcaaataattcactttcaagtaatggaaatgttacagaatcaggttgtaaagaatgtgaagaattggaggaaaaaaatataaaggaatttttacaatcatttgttcatattgttcaaatgtttattaatacttca

SEQ ID NO: 33194 - DNA, 486 bp, synthetic construct
  misc_feature 1..486: note = Description of Artificial Sequence: Synthetic coding sequence
  source 1..486: mol_type = other DNA
atgagaatctcaaaacctcatctgcggtccatctcaatccagtgctacctgtgtctgttgctgaattctcactttttgaccgaggccggaatccacgtctttatcctgggttgcttctcggcggggttgccaaagacggaagcaaactgggtcaacgtgattagcgatctcaagaagatcgaggacctcatccagtcgatgcacattgatgctactctgtacaccgaaagcgacgtccacccgtcgtgtaaggtgactgccatgaaatgcttcttgttggaactgcaggtcatatcccttgaaagcggcgatgcttcaatccatgacactgtggagaacctcatcatcttggcaaacaactcgctgtcgtccaatggtaatgtgaccgaatcggggtgcaaggagtgcgaggaactcgaagaaaagaacattaaggaatttctgcagagcttcgtgcatattgtgcaaatgttcatcaataccagc

SEQ ID NO: 33195 - DNA, 486 bp, synthetic construct
  misc_feature 1..486: note = Description of Artificial Sequence: Synthetic coding sequence
  source 1..486: mol_type = other DNA
atgagaattagcaagccacatttgagaagtatctctattcagtgctatctctgtctacttttgaatagtcattttctaacagaggcggggattcatgtgtttattcttggatgttttagcgccgggttaccaaagacggaggccaactgggtgaacgtcatatctgatttgaagaaaattgaggatctaattcaatcaatgcatattgatgctacattgtatacagagtctgatgtacacccatcgtgcaaagtcacagctatgaagtgctttttgcttgagcttcaagtgatctcactagagtctggggacgcctctattcatgacactgttgagaaccttataattttggcaaataatagtctgtcatctaacgggaatgtgaccgaatcaggatgcaaagaatgtgaggaacttgaagaaaagaatatcaaggagttccttcagagttttgtccatattgtgcagatgttcattaatacaagc

SEQ ID NO: 33196 - DNA, 486 bp, synthetic construct
  misc_feature 1..486: note = Description of Artificial Sequence: Synthetic coding sequence
  source 1..486: mol_type = other DNA
atgcggatcagcaagccgcatctacgttccatttctattcaatgctacctgtgtctgcttctcaatagccactttctgaccgaggctggtattcatgttttcatcctgggctgttttagcgcgggtctgccaaagacggaggcgaattgggttaatgtcatcagcgacttgaaaaaaatagaggatctgattcagagtatgcacattgatgccaccctgtacaccgaaagcgatgtacacccatcctgcaaggtgacggcgatgaagtgctttcttctggagttgcaggtgatctcgctcgaaagcggtgacgcatctatccatgacactgtagagaacctgatcatcctggcaaacaacagcctgagcagcaacggaaacgtcaccgagagcggatgcaaggagtgtgaagaactcgaagaaaaaaacattaaggaattcctgcaatctttcgttcacattgtacagatgttcatcaacacctcc

SEQ ID NO: 33197 - DNA, 486 bp, synthetic construct
  misc_feature 1..486: note = Description of Artificial Sequence: Synthetic coding sequence
  source 1..486: mol_type = other DNA
atgcgaattagcaaaccccacctgcgatcgatctcgattcagtgctacctttgcctcctgctgaatagccatttcctcaccgaggcaggaatccatgtgtttatacttggctgcttctccgctgggctccctaagactgaagctaactgggtgaacgtcataagcgatctcaagaaaatcgaggaccttatccagtcgatgcacatagatgcaactctgtacactgaatcagacgtgcatccttcgtgtaaggtcactgcgatgaagtgctttcttctggagctgcaagtgatttcgcttgaatcaggagatgccagcatccatgatacggtggagaatctgattattctggcaaataactccttgagctccaatggtaacgtcaccgagtcaggatgtaaggaatgcgaagaattggaagagaaaaacatcaaggaatttcttcagagctttgtgcatatcgtgcagatgttcattaacacctcc

SEQ ID NO: 33198 - DNA, 486 bp, synthetic construct
  misc_feature 1..486: note = Description of Artificial Sequence: Synthetic coding sequence
  source 1..486: mol_type = other DNA
atgcgcatttccaagccacatctccgctcgatctcgatccaatgttacctgtgcctgttgctcaattcgcactttctgaccgaagcgggaatccatgtctttatcctcggttgcttctcagcaggactccctaagactgaggcaaactgggtgaacgtgatcagcgacctgaagaagatcgaggatctcatccagtcgatgcacatcgacgcaactctctacaccgagtccgatgtgcacccgtcctgcaaggtgaccgccatgaaatgctttctgctcgaactgcaggtgatcagcttggagtcgggagacgcctcaatccatgatactgtggagaacctgatcattctggctaacaattcgctgtcgtcaaatggcaacgtgaccgagtcgggttgtaaggagtgtgaggaactggaggaaaagaatatcaaggaattcctccagtcattcgtgcacatcgtgcagatgttcatcaacacctca

SEQ ID NO: 33199 - DNA, 486 bp, synthetic construct
  misc_feature 1..486: note = Description of Artificial Sequence: Synthetic coding sequence
  source 1..486: mol_type = other DNA
atgcggatctcgaagcctcatctcaggtcaataagcattcagtgctacctttgtttgctgctcaactcccacttccttaccgaagcgggcattcacgtgtttatactgggttgcttttcagcagggcttccaaaaactgaagcaaattgggtgaatgtcatttcggaccttaagaaaattgaagatcttattcaaagcatgcatattgatgctaccctgtacactgagtcggacgttcatccttcatgtaaggtgacggccatgaagtgcttcctgctggaactccaagtcatcagcctggagtcgggcgacgcatcgatccatgatactgtggaaaacctcataattctggctaacaacagcttgtcctccaatggaaacgtgacggagtcaggttgcaaggaatgtgaggagctcgaagagaagaacataaaagagtttcttcagagctttgtgcacattgtccaaatgttcatcaatacctcc

SEQ ID NO: 33200 - DNA, 486 bp, synthetic construct
  misc_feature 1..486: note = Description of Artificial Sequence: Synthetic coding sequence
  source 1..486: mol_type = other DNA
atgcgcatttccaaaccgcacctccgatccatctctatccagtgctacctgtgtctcctcttgaactcacattttctgactgaagcggggatccacgtgttcattctgggatgcttctctgccggcctcccaaagactgaagccaactgggtcaacgtgatctcagatctcaagaaaatcgaggacctcatacaatccatgcacatcgatgccactctgtacacggagtcagatgtgcatcccagttgtaaggtgaccgctatgaagtgcttcttgctcgaactgcaggtgatttcgcttgagtcgggagacgcgtcgatccacgacaccgtcgagaatctgatcatcctcgcaaacaattcgctgtcatctaacggcaacgttacggaatcgggatgtaaggaatgcgaggagctggaagaaaagaacatcaaagaattcctgcagtcgtttgtgcatattgtccaaatgttcatcaatacctcc

SEQ ID NO: 33201 - DNA, 486 bp, synthetic construct
  misc_feature 1..486: note = Description of Artificial Sequence: Synthetic coding sequence
  source 1..486: mol_type = other DNA
atgcgcatttccaagcctcatcttaggtcaatctcaatccagtgctacctttgccttttgcttaattcacatttcctgaccgaagcgggaattcatgtgtttattctgggatgctttagcgcaggccttccaaaaactgaagcaaattgggtgaatgtcatctccgatctgaagaagattgaagatcttatacaatctatgcacatagatgcaaccctttacaccgaatccgatgtccacccttcatgtaaagtcaccgcaatgaagtgttttcttcttgagctgcaagtgatttcgctggaatccggcgacgcgagcatccatgatactgtcgagaatctcatcatcttggcaaacaactccctttcgtcaaatggcaatgtgaccgaaagcggttgtaaagaatgtgaagaactggaggaaaagaacatcaaggagtttctgcaatcgtttgtgcacattgtgcagatgttcattaacacctct

SEQ ID NO: 33202 - DNA, 486 bp, synthetic construct
  misc_feature 1..486: note = Description of Artificial Sequence: Synthetic coding sequence
  source 1..486: mol_type = other DNA
atgcgaatctctaaaccacacctgcggagcatttcgatccagtgttacctgtgtttgctgcttaactcccactttctgactgaggccggtatccatgtcttcatcctgggctgcttcagtgctggcctgcccaaaacggaagccaactgggttaacgtcatcagcgatctgaagaaaatcgaggatctgattcagagtatgcatattgatgccactctctacacagaaagcgacgttcatccctcctgtaaggtgacagccatgaagtgttttttgctggagctccaggtgatctccctagaaagcggggacgccagcattcacgacactgtggagaacctcattattctagccaataattctctttcaagcaatggcaacgtgactgagtcgggatgcaaggagtgcgaagagttagaggaaaagaatattaaggaattccttcagtcattcgtccacattgtgcagatgttcataaatacaagt

SEQ ID NO: 33203 - DNA, 486 bp, synthetic construct
  misc_feature 1..486: note = Description of Artificial Sequence: Synthetic coding sequence
  source 1..486: mol_type = other DNA
atgcgtatctctaagccacatcttcgaagtatcagtattcagtgctacctgtgcctcctcctaaattcacactttcttaccgaggctggaattcacgtgttcatactggggtgcttttccgctggactacctaagaccgaggcgaactgggtcaacgtgatcagcgatctaaagaaaatcgaggatctgatccagagtatgcatatcgatgctacactgtacaccgagtctgacgtgcacccatcatgtaaggtcacagccatgaagtgttttcttctggagctgcaggtcattagtctggagagcggtgacgcctcaattcacgatacagtagagaacctcatcatactggctaataattctctcagcagcaacggtaacgtaacagagtcaggatgcaaggagtgcgaggagcttgaagaaaagaatatcaaagagttccttcagagctttgttcacatcgtgcagatgttcatcaatacaagc

SEQ ID NO: 33204 - DNA, 486 bp, synthetic construct
  misc_feature 1..486: note = Description of Artificial Sequence: Synthetic coding sequence
  source 1..486: mol_type = other DNA
atgcgtatctctaaaccgcacctgaggagtataagcatccagtgttatctgtgtttgctcctgaacagtcatttcctcaccgaagcaggcatccacgtattcatactgggctgtttctcagctgggctgcctaagactgaggccaattgggtgaacgtgattagtgacctcaagaagatcgaggacctgatacaatctatgcatatcgacgcaaccctttacaccgaatctgatgtgcacccttcatgcaaggtcaccgccatgaaatgctttcttttagagctgcaggtgattagcttagagagcggagacgccagcattcacgacaccgtagagaatctgatcatcctggctaacaactctctctcatcaaatggtaacgttaccgaaagcggatgcaaggagtgcgaggagctcgaggaaaaaaacataaaggagtttcttcagagtttcgtgcatatcgtccaaatgtttatcaacacctca

SEQ ID NO: 33205 - DNA, 486 bp, synthetic construct
  misc_feature 1..486: note = Description of Artificial Sequence: Synthetic coding sequence
  source 1..486: mol_type = other DNA
atgaggatcagtaaaccacaccttaggtcaatatctatccaatgctacctttgcctgctgttgaacagccacttcctgactgaggcggggatccacgtgtttattctgggatgtttctcagccggacttccaaagaccgaagcaaattgggtgaacgttatttcagacctgaaaaagatcgaggacctgatccagagtatgcacatcgatgcaactctgtatactgaaagcgatgtgcatccttcctgtaaggtcaccgcaatgaagtgttttcttctggaactgcaggtgataagcctcgagagcggagacgcttccatccacgacacggtggagaacttgattattctcgccaataacagtctgagcagtaacggaaacgtcacagagtccggctgtaaagagtgtgaagagctcgaggagaaaaatatcaaagaatttctccaatcttttgtgcatatcgtgcagatgtttattaatacttct

SEQ ID NO: 33206 - DNA, 486 bp, synthetic construct
  misc_feature 1..486: note = Description of Artificial Sequence: Synthetic coding sequence
  source 1..486: mol_type = other DNA
atgagaattagcaaaccccacctccgctcaatctcgatccagtgctacctctgcctgctgctcaattcccacttcctcacggaggccggcatccacgtgtttatcctggggtgcttcagcgctggactgccgaagactgaggctaattgggtgaacgtcatctccgatctcaagaagatcgaggatctgatccaatcgatgcacattgacgcgaccctgtacaccgaatcagatgtgcatccgagctgtaaagtgactgcgatgaaatgcttcctgttggaactgcaggtgatctcgctggaatctggagatgcttccatccatgatactgtggaaaacctgatcatcctcgccaataactcgctcagctccaacggaaacgtcaccgagagcggatgtaaggagtgtgaagagctggaggagaagaacatcaaagagtttctccagtctttcgtgcatatcgtgcagatgttcattaatacttcc

SEQ ID NO: 33207 - DNA, 486 bp, synthetic construct
  misc_feature 1..486: note = Description of Artificial Sequence: Synthetic coding sequence
  source 1..486: mol_type = other DNA
atgaggatctcaaaaccgcacctccgctctatctcaattcagtgctacctgtgcctgctgctcaatagccatttcctgacggaagccggaatccacgtctttattctgggctgtttctccgcgggcttgcccaagaccgaagccaattgggtcaacgtgattagcgatttgaaaaagatcgaagatctgatccagtcgatgcacattgacgctacgctctacaccgagtccgatgtccacccatcgtgcaaagtcaccgccatgaagtgcttcttgcttgagcttcaagtcatttctcttgagagcggggacgcatcaatccacgacactgtcgaaaatctcattatcctggccaataacagcctgtcctccaacgggaatgttaccgaatccggatgtaaggaatgcgaagagctcgaggaaaagaacatcaaagaattccttcagtcctttgtgcacatcgtgcagatgtttatcaatacttcc

SEQ ID NO: 33208 - DNA, 486 bp, synthetic construct
  misc_feature 1..486: note = Description of Artificial Sequence: Synthetic coding sequence
  source 1..486: mol_type = other DNA
atgagaatctcaaaaccgcacctgcggtcgatctctattcagtgctacctctgccttctgttgaatagccactttctgaccgaagcaggaatccacgtattcatcctggggtgcttctcggccggactcccgaaaaccgaagcgaattgggtgaacgtcatctcggatctgaaaaagatcgaagatctgatccaatcaatgcacatcgacgcaactctttatactgagtccgacgtgcacccttcctgcaaggtgactgccatgaagtgcttcttgctggaactgcaggtgatatcgctggagtcgggtgatgcctcaattcacgacacggttgaaaacctcattatcctcgccaacaattcgctgtcgtcaaacggtaatgtcaccgaatctggatgtaaggaatgcgaagagctggaggaaaagaacatcaaggagtttctgcagtcgtttgtgcatatcgtccaaatgttcatcaacactagc

SEQ ID NO: 33209 - DNA, 486 bp, synthetic construct
  misc_feature 1..486: note = Description of Artificial Sequence: Synthetic coding sequence
  source 1..486: mol_type = other DNA
atgaggatttccaagccacatctgcgcagtatctcaatccagtgttacttatgtctgctcctgaacagccactttctaactgaggcgggcatccacgttttcatcttgggctgcttctccgcaggcttgccaaaaaccgaagcaaactgggtgaacgtgatctccgacttgaaaaagattgaggatttgatacagtctatgcatatcgacgctaccttgtacactgaaagcgatgttcacccgtcctgcaaagttacagccatgaagtgctttttgctcgaactgcaagttatctcacttgagtctggagacgccagtattcacgatacagtcgagaacctgatcatattggctaataactcgctgagctctaacggcaatgtcactgaaagcggctgtaaggagtgtgaggaactggaagagaaaaacataaaagaatttctgcagtcctttgtgcatatcgtgcaaatgtttataaacacaagc

SEQ ID NO: 33210 - DNA, 486 bp, synthetic construct
  misc_feature 1..486: note = Description of Artificial Sequence: Synthetic coding sequence
  source 1..486: mol_type = other DNA
atgcgaatttcaaagcctcacctgcgatccatatcaattcagtgttacctgtgcctgctgctgaatagtcatttcctaacggaagccggaatccacgtgttcattctgggctgttttagtgcaggtctgccaaagaccgaggcaaactgggttaatgtgatcagcgacctcaagaagatagaagacctgattcagtctatgcacatcgatgccacgctgtacaccgagtcagatgtgcacccatcttgcaaagtgacggcaatgaagtgctttcttctggagctccaggttatttcactggagtcgggggatgcaagcatccatgatacagtagagaacttgattatcctagctaacaactccctgagtagtaacgggaacgtgactgagtccggatgtaaggaatgtgaggagcttgaggagaagaatattaaagagtttctccagagttttgtgcacatcgttcagatgtttattaatacgagt

SEQ ID NO: 33211 - DNA, 486 bp, synthetic construct
  misc_feature 1..486: note = Description of Artificial Sequence: Synthetic coding sequence
  source 1..486: mol_type = other DNA
atgagaatctccaagcctcacctgaggagcatatccattcagtgctacctctgcttgctcctgaacagccacttcctcactgaggccgggatccacgtgtttatcctcgggtgtttctcggccgggctaccgaagacagaagcgaactgggtgaatgtgatctccgatctaaaaaaaattgaggatctcatccaatctatgcatattgatgccacattgtacactgagtctgacgtccatccgagctgcaaagtcaccgcaatgaagtgttttttattggagctgcaggtaatcagcttagagtccggggatgccagtatccatgataccgtggaaaatctcattatactggccaacaactctttatcttctaatggcaacgtcacggagtccggttgtaaggaatgcgaagaactcgaggaaaagaatattaaggaattcctacagtctttcgtgcacatcgtgcagatgttcatcaatacctcc

SEQ ID NO: 33212 - DNA, 486 bp, synthetic construct
  misc_feature 1..486: note = Description of Artificial Sequence: Synthetic coding sequence
  source 1..486: mol_type = other DNA
atgcgaatcagcaaaccccatcttcggtcgatttcaatccaatgttacctgtgtttgcttctcaattcacattttctgaccgaagcaggaattcacgtgttcatacttggatgtttttccgccgggcttcccaaaactgaagcgaactgggtgaatgtaatctcggatctgaagaagattgaagatcttatccaatcgatgcacattgacgctaccctctacactgaatcagacgtccatccgagctgcaaggtgaccgctatgaaatgttttctgctcgagctgcaggttatatcgcttgagagcggcgacgcatcgattcatgacactgtggagaaccttatcatacttgccaacaatagcctttcgtccaacggtaacgtgaccgagtccggttgcaaggaatgcgaggaattggaagaaaagaacataaaggaatttctccagtcatttgtgcatatcgtccagatgttcattaacacgtcc

SEQ ID NO: 33213 - DNA, 486 bp, synthetic construct
  misc_feature 1..486: note = Description of Artificial Sequence: Synthetic coding sequence
  source 1..486: mol_type = other DNA
atgcggatttcgaaaccccatctccggtcgatctcgatccagtgttacttgtgccttcttctcaactcccactttttgactgaagccgggatccatgtgttcatacttggatgttttagcgcaggtctgccaaagaccgaggcgaattgggtgaatgtcatttcggacctcaagaagatagaagatctgatacaatcaatgcacattgatgccactctttacaccgaatccgacgtgcatccttcgtgcaaggtcactgccatgaagtgttttttgcttgagttgcaagtcatctcactggaatccggtgatgccagcattcacgataccgtggaaaatcttatcattcttgcaaataacagcctgtcctcaaacggaaatgtaactgagtctggctgtaaggagtgcgaagaacttgaggagaagaacattaaagaatttctccaatcattcgtgcatattgtccagatgttcatcaacacttcc

SEQ ID NO: 33214 - DNA, 486 bp, synthetic construct
  misc_feature 1..486: note = Description of Artificial Sequence: Synthetic coding sequence
  source 1..486: mol_type = other DNA
atgcgtatatcgaagccacaccttagatctatctccatccagtgttacttgtgcctgctgctcaactctcatttcttaacggaggcagggattcacgtgttcattctgggctgcttttcagctggactaccaaagacggaagcaaactgggttaacgtgatcagcgacctaaaaaaaatcgaagatctgatccagtctatgcatatcgacgctacactgtacaccgaaagcgatgtacatccatcctgcaaagtcactgcgatgaagtgtttccttctggaactgcaagtcatcagtttggagtcaggcgatgccagcatccacgatacagtggagaacttaatcatcctggccaataactcactatcttcgaatggaaatgttaccgagtctggatgcaaggaatgcgaggagttggaagaaaaaaacatcaaagagttcctccagtcgtttgtccacattgtccagatgttcatcaacacaagt

SEQ ID NO: 33215 - DNA, 486 bp, synthetic construct
  misc_feature 1..486: note = Description of Artificial Sequence: Synthetic coding sequence
  source 1..486: mol_type = other DNA
atgcggattagtaagccgcatctgcgtagcattagcattcagtgttatttgtgtttattacttaattcgcattttttgacagaggccggtatccacgtgtttatcctgggctgcttcagcgctggactgcctaagaccgaagcgaactgggtgaacgttatctccgatttgaaaaaaattgaagacctgatccagtccatgcatatagatgcaactttgtatacagagagtgatgttcatccctcatgcaaggtgaccgccatgaaatgctttctgttagaattgcaggtcatttctttagagtctggtgatgcaagtattcatgatacagttgaaaatctgattatcttagcaaataacagtctgtctagcaacggcaacgtcacagaatctggttgtaaagagtgtgaggaattagaggaaaagaatataaaagaattccttcagagctttgtccatattgtgcaaatgtttataaacacatct

SEQ ID NO: 33216 - DNA, 486 bp, synthetic construct
  misc_feature 1..486: note = Description of Artificial Sequence: Synthetic coding sequence
  source 1..486: mol_type = other DNA
atgaggattagtaaaccgcacctcaggtctatttcgatccaatgctacctgtgcttgcttctgaattctcactttctgaccgaagccgggatccacgtatttattttaggctgtttctcagctggtcttccgaagacagaagctaactgggtcaatgtcatttccgacttgaaaaagattgaggacctgattcagtcaatgcacatagacgcgacgctctatactgaaagtgacgtgcacccctcatgcaaagtgacggccatgaagtgctttctgctggagttgcaggtgatctctctggaatccggagacgcttccatccacgacactgtggaaaaccttatcatcctggcgaacaattctctgagtagcaacggaaatgtgactgaatccggttgtaaagagtgtgaggagctagaagagaagaacattaaggaatttctgcagtctttcgtgcacatcgtacagatgtttatcaacactagc

SEQ ID NO: 33217 - DNA, 486 bp, synthetic construct
  misc_feature 1..486: note = Description of Artificial Sequence: Synthetic coding sequence
  source 1..486: mol_type = other DNA
atgagaatcagcaaaccgcatctgcgcagcatctcgatccagtgctacttgtgccttctgcttaactcccatttcctcacggaagccggaattcacgtattcatcctcggttgtttctccgcagggctgccgaaaactgaggccaattgggtgaacgtgatctccgatctgaagaagatcgaagatttgatccagtcgatgcacatcgatgctactctctacactgagtcggatgtgcacccgtcttgcaaggtgaccgcgatgaagtgcttcctgctggaactgcaggtcatcagcttggagtcgggcgacgcttcaattcacgacaccgtggaaaacctgatcattttggccaataactcactctccagcaacggtaacgtgactgaatctggatgcaaggagtgcgaagaactggaagaaaagaacatcaaagagttcctgcagagttttgtgcacatcgtccagatgttcatcaatacctcg

SEQ ID NO: 33218 - DNA, 486 bp, synthetic construct
  misc_feature 1..486: note = Description of Artificial Sequence: Synthetic coding sequence
  source 1..486: mol_type = other DNA
atgcgaatcagtaaacctcacttgcgtagtatctcgatacagtgctacttgtgcctgctgctgaattcccatttcctgaccgaggcaggaatccatgtgttcatcctagggtgcttttccgcaggtttgcctaagaccgaggccaactgggtgaacgtaattagcgacctgaagaaaattgaggacctcatccagtccatgcacatagacgcaaccttgtacacagaatctgacgtgcatccttcctgtaaagtgacagcaatgaagtgtttccttttggagttgcaagtcataagtcttgagagcggcgacgctagtatccacgacaccgtcgagaatcttatcatcctcgccaacaactcattatcaagcaacggcaatgtgaccgaaagtggatgcaaggagtgcgaggagcttgaagagaaaaatatcaaagagttcttacaatcattcgttcacatcgtccagatgtttattaacacaagc

SEQ ID NO: 33219 - DNA, 486 bp, synthetic construct
  misc_feature 1..486: note = Description of Artificial Sequence: Synthetic coding sequence
  source 1..486: mol_type = other DNA
atgaggatatcaaaaccgcaccttcgctccatatctatccagtgttacctatgccttcttctaaatagtcacttcctcactgaagctggaatacatgtatttatacttgggtgtttcagtgcagggctacctaaaacagaggcaaattgggtgaacgtgatatctgatttaaagaaaatcgaagatctcatccagtctatgcacattgacgccacactctatacagaatcggatgtgcatccctcctgcaaagttacggctatgaaatgcttcttactcgagctacaggtaatctctctagagtcgggggatgcaagtatccatgatacagttgagaacctaataatcctcgctaacaattcactctcttctaatggaaacgtgactgaatcggggtgtaaagaatgtgaagaactagaagaaaaaaacatcaaagagttcttacaatccttcgttcatatcgtgcagatgttcattaatacttct

SEQ ID NO: 33220 - DNA, 486 bp, synthetic construct
  misc_feature 1..486: note = Description of Artificial Sequence: Synthetic coding sequence
  source 1..486: mol_type = other DNA
atgaggatttctaagccgcacctgcgtagcatatccatccagtgctatttgtgtttgctactgaactcccacttcctgactgaggccggcatccatgtctttattctcggctgtttcagcgccggcctgccaaagaccgaggctaattgggtgaacgttatctccgacctgaagaagatagaggacttgatacaatctatgcacatcgacgccaccttgtacacggagtccgatgtgcatccgagttgcaaagtcaccgctatgaagtgcttcctccttgagctgcaggtgatatcgcttgagtccggcgacgcgagtattcatgatacagtcgagaatctaatcatcctggccaataattccttgagctcaaatggaaacgtgacggagagtggctgcaaggaatgtgaggaattggaggaaaagaatataaaagagttcttgcagagtttcgtgcacattgtccagatgttcataaacaccagc

SEQ ID NO: 33221 - DNA, 486 bp, synthetic construct
  misc_feature 1..486: note = Description of Artificial Sequence: Synthetic coding sequence
  source 1..486: mol_type = other DNA
atgcgtatatcgaaaccgcatctacgatcgatatcgatacaatgttatttatgtctactactaaattcgcattttttaacggaagcgggtatacatgtatttatactaggttgtttttcggcgggtctaccgaaaacggaagcgaattgggtaaatgtaatatcggatttaaaaaaaatagaagatttaatacaatcgatgcatatagatgcgacgctatatacggaatcggatgttcatccgtcgtgtaaagtaacggcgatgaaatgttttttattagaattacaagttatatcgctagaatcgggtgatgcgtcgatacatgatacggtagaaaatttaataatattagcgaataattcgttatcgtcgaatggtaatgtaacggaatcgggttgtaaagaatgtgaagaactagaagaaaaaaatataaaagaatttttacaatcgtttgtacatatagtacaaatgtttataaatacgtcg

SEQ ID NO: 33222 - DNA, 486 bp, synthetic construct
  misc_feature 1..486: note = Description of Artificial Sequence: Synthetic coding sequence
  source 1..486: mol_type = other DNA
atgcgcattagcaagccacatctgcggtccatttctatccagtgctatttgtgcctgctgctcaacagtcattttctcactgaagccgggatccacgtgttcatcctgggatgcttctctgccggattgccgaagaccgaagctaactgggtcaacgtgatttcagatttgaaaaagatcgaggatctgatacagagcatgcacattgatgcaaccttgtacaccgagagcgacgttcacccaagctgcaaagtgaccgctatgaagtgcttccttcttgaactgcaagtaattagtctggaaagcggcgacgcaagtatccacgataccgtggaaaacctcatcatactcgccaacaacagccttagctcaaatggaaacgttaccgagtccggttgtaaggagtgtgaggagctggaggaaaaaaacatcaaggagtttcttcaaagcttcgtgcatattgtacagatgttcatcaacaccagt

SEQ ID NO: 33223 - DNA, 486 bp, synthetic construct
  misc_feature 1..486: note = Description of Artificial Sequence: Synthetic coding sequence
  source 1..486: mol_type = other DNA
atgaggatctctaaaccccatttacgatccatttccatccagtgctacctgtgtctcttgctgaactcccatttcctgacagaggccggtatacatgtgttcatcttgggctgctttagcgctggtctgccaaaaacagaggctaactgggtgaatgtgattagtgacttgaaaaaaatagaagatctgatacagtccatgcatatcgacgcaaccctctataccgaatccgatgtacatccctcatgtaaagtgaccgcaatgaagtgttttctgcttgagctgcaagtcatttcactggagtcaggagacgctagtatacatgacaccgtcgagaacctgattatcctggccaacaattctttgagctctaatggcaacgtgaccgagtccggatgcaaagagtgcgaagagttggaagagaaaaacataaaggagttccttcagtcattcgtacatatcgtgcagatgtttatcaatacctct

SEQ ID NO: 33224 - DNA, 579 bp, synthetic construct
  misc_feature 1..579: note = Description of Artificial Sequence: Synthetic coding sequence
  source 1..579: mol_type = other DNA
atggcggctgagcctgtggaagataactgcatcaatttcgtggccatgaaattcatcgacaataccctctatttcatcgccgaggacgacgagaacttggagtccgattactttggaaaactggagagtaaacttagtgtcattcggaatctgaacgatcaggtcctgttcattgatcaggggaaccgcccgttatttgaggacatgacagattccgactgccgggataatgccccaaggacgatttttataatctcaatgtacaaggatagccaacccagagggatggccgtcacaatttccgtgaagtgtgagaagatatccactctcagctgtgagaataaaattatctccttcaaggaaatgaatccaccagacaatatcaaagacacaaagtctgatattatattctttcagagatcagtgcccggccatgataacaagatgcagtttgaaagtagctcctacgagggatatttcctagcatgtgaaaaagagcgggatttgttcaagttgatcttgaagaaggaggatgagctaggagaccgaagcataatgtttacagtccagaatgaagac

SEQ ID NO: 33225 - DNA, 579 bp, synthetic construct
  misc_feature 1..579: note = Description of Artificial Sequence: Synthetic coding sequence
  source 1..579: mol_type = other DNA
atggccgcggagccagtggaggataattgcattaattttgttgctatgaagttcatcgataataccctgtactttattgccgaggacgacgagaacctggaaagcgactactttggtaagcttgagtccaaactgtccgtgatccggaatttgaacgaccaggtgttgtttattgatcagggtaaccgcccgctgtttgaggatatgacagactcagactgtcgtgataatgcaccacgaaccatcttcataatctccatgtacaaagacagccagccacgaggtatggcggtgacaatcagcgtgaagtgcgagaagataagtaccttatcctgcgagaataagataatcagtttcaaagaaatgaatccacccgataacatcaaggacaccaagtcggacattatcttttttcagcgctcagtgccgggacacgacaacaagatgcagtttgagtcatctagttatgagggatacttccttgcgtgtgaaaaggaacgtgatttattcaagctgatactgaagaaggaggatgagctgggtgatcggagcattatgtttaccgtgcagaacgaggac

SEQ ID NO: 33226 - DNA, 579 bp, synthetic construct
  misc_feature 1..579: note = Description of Artificial Sequence: Synthetic coding sequence
  source 1..579: mol_type = other DNA
atggccgccgagcctgttgaagataactgtatcaactttgtcgcaatgaagttcatcgataataccctctacttcatcgccgaggacgacgaaaatcttgagagcgactacttcgggaagctggaatcaaagttgagtgtcatccgcaatctcaacgatcaggtgctgttcatcgatcaagggaatcgccccttgtttgaagatatgaccgattcggactgcagagacaacgctccacggaccatcttcattatctccatgtacaaggattcgcagccgagaggaatggctgtgactatcagcgtcaagtgcgagaagataagcacgctgtcgtgcgaaaacaagatcatttcgttcaaggagatgaacccaccagataacatcaaagacactaagtctgacattatcttctttcagcggagcgtgccgggacatgataacaagatgcagtttgagtccagctcttacgaaggctacttcttggcatgcgagaaggagcgcgacctgtttaagctgattctgaagaaggaggacgaactcggggatcggtccatcatgttcaccgtgcagaatgaagat

SEQ ID NO: 33227 - DNA, 579 bp, synthetic construct
  misc_feature 1..579: note = Description of Artificial Sequence: Synthetic coding sequence
  source 1..579: mol_type = other DNA
atggctgcagaacctgttgaggataattgtatcaattttgtcgcgatgaagtttattgataatactctgtactttattgctgaagatgacgaaaaccttgaatccgactactttggaaagttggaatccaaactttcagtgattaggaacctcaacgatcaagtgcttttcatagatcaaggtaaccgcccgctgtttgaggacatgaccgactcggattgccgggacaacgccccgcgaaccattttcatcatatctatgtacaaggactcacagcctcgcggaatggcagtgaccatctccgtgaagtgcgagaaaatctcaaccctgtcttgtgaaaacaagataatctcattcaaggagatgaatccacctgataacataaaagatactaaatcagacattatcttttttcaaagaagcgtgccagggcatgacaacaaaatgcaattcgaatcctcctcctatgagggctacttcctggcatgtgagaaagagagagatctctttaaacttatactgaagaaggaagatgaattgggtgatcgctccatcatgttcactgttcagaacgaggat

SEQ ID NO: 33228 - DNA, 579 bp, synthetic construct
  misc_feature 1..579: note = Description of Artificial Sequence: Synthetic coding sequence
  source 1..579: mol_type = other DNA
atggcggccgagccggtggaagataattgcataaacttcgttgccatgaaattcatcgataacaccctgtacttcattgccgaagacgacgagaatctcgagtctgactacttcgggaagctggagtctaagctttctgtgattcgtaatctgaatgatcaggtgctgtttatcgaccaggggaataggcccctctttgaagatatgaccgattctgactgtagggacaatgcaccccgaaccatattcataatttctatgtacaaagattcacagccacggggtatggccgtgaccattagtgttaagtgcgaaaaaatttctacactttcttgcgagaacaaaatcatttctttcaaggaaatgaatcctcccgacaacattaaagacaccaaaagtgacattattttcttccagcgatccgtccctggtcatgataataagatgcaattcgaaagtagttcctacgagggctacttcctggcatgtgaaaaggagagggatctgttcaagctcatcctcaagaaagaagacgaactcggtgatcggtccattatgttcacagtgcagaatgaagat

SEQ ID NO: 33229 - DNA, 579 bp, synthetic construct
  misc_feature 1..579: note = Description of Artificial Sequence: Synthetic coding sequence
  source 1..579: mol_type = other DNA
atggccgcagaacccgtcgaagataactgtattaattttgtggctatgaaatttattgataatacactgtactttatcgctgaggatgacgagaaccttgagtccgactattttggcaaactagagagtaagctcagcgtgatccgcaatctgaatgaccaggttttatttattgaccaggggaacaggccgttgttcgaagacatgaccgactcagattgtcgcgacaacgctcctagaacaatctttattatctcaatgtacaaagatagccagccacgaggcatggccgttacaatttccgtgaaatgcgagaagattagcacattaagctgtgaaaacaaaatcatctcattcaaggagatgaatcctcctgacaacattaaagatactaagagtgacattatcttcttccagcggtcggtgccagggcacgataataagatgcagttcgagtcctccagctatgagggttattttctggcctgcgaaaaggagagagacctattcaagctgattctcaaaaaagaggatgagcttggagacaggagtatcatgttcacagtccaaaatgaagat

SEQ ID NO: 33230 - DNA, 579 bp, synthetic construct
  misc_feature 1..579: note = Description of Artificial Sequence: Synthetic coding sequence
  source 1..579: mol_type = other DNA
atggccgcagaaccggtcgaagacaactgcatcaacttcgtggcgatgaagttcattgataatacgctttacttcatcgctgaagacgatgaaaacctggagtcggactacttcggtaaactggaatcgaaactttcggtgatcagaaatctgaatgaccaggttctcttcatcgaccaaggaaatcgcccgctgtttgaggacatgaccgatagtgattgccgagacaatgcgccgagaaccatctttatcatcagcatgtacaaggactcccagccacggggcatggcagtgactatcagcgtgaagtgcgagaagatctccaccctctcgtgtgaaaacaagattatctcattcaaggaaatgaatccaccagacaacatcaaagacaccaagtccgacatcatcttcttccaaagatcggtcccaggtcacgacaacaaaatgcaattcgaatcgtcgagctacgaaggatatttcctcgcttgcgaaaaagagcgcgatctttttaagctcatcctgaaaaaggaggatgaattgggcgaccgctcgattatgtttaccgtgcagaatgaggac

SEQ ID NO: 33231 - DNA, 579 bp, synthetic construct
  misc_feature 1..579: note = Description of Artificial Sequence: Synthetic coding sequence
  source 1..579: mol_type = other DNA
atggcagccgagccggttgaggataactgtatcaatttcgtcgcaatgaagttcattgataacactctttactttattgcggaggacgatgaaaacctggagtcagattactttggcaaactggaatcgaaactcagcgttattaggaatcttaatgatcaagtgttgtttattgatcagggtaacagaccgctgtttgaggatatgaccgactcggactgcagagacaatgcacccagaactatctttatcattagcatgtacaaagattcgcagcctcgtggaatggcagtgacgatttcagtgaaatgtgaaaagataagcaccctgagctgtgagaacaagattatctcgtttaaggaaatgaatcctccagataacattaaggacactaagtccgatatcattttcttccagcgatcggtgcctggccacgacaataagatgcaatttgaatcgtcatcatatgaaggatacttcctcgcatgtgaaaaggaaagagatcttttcaaacttattcttaagaaagaggatgaactgggagatagatcaatcatgtttactgtccagaacgaggac

SEQ ID NO: 33232 - DNA, 579 bp, synthetic construct
  misc_feature 1..579: note = Description of Artificial Sequence: Synthetic coding sequence
  source 1..579: mol_type = other DNA
atggctgcggagccggtcgaagacaactgtatcaatttcgtggctatgaagttcatcgacaacactctgtattttatcgccgaagatgatgaaaacctggaaagcgactattttggtaagttggaaagcaagctgagcgtcattcgcaacctgaatgatcaagtactctttatcgaccagggcaaccggccgctgttcgaggatatgactgattctgattgtcgtgataatgcccctcgcacaatcttcattatctccatgtataaggatagccagccacgaggcatggccgtcaccatttctgttaaatgtgagaaaataagcaccttgagctgcgaaaataaaattatcagcttcaaagaaatgaaccctccggataacattaaagacacgaaatccgacatcatcttcttccagcgcagcgtgcccggtcacgataacaagatgcagtttgagtccagtagttacgaaggctatttcctggcctgcgagaaggagcgcgacctgttcaaactcatcctgaaaaaagaagacgagctgggcgatagatctatcatgtttaccgtgcaaaatgaggat

SEQ ID NO: 33233 - DNA, 579 bp, synthetic construct
  misc_feature 1..579: note = Description of Artificial Sequence: Synthetic coding sequence
  source 1..579: mol_type = other DNA
atggcagcggaacctgtggaggacaactgtataaactttgtggccatgaagttcattgacaataccctttacttcattgcagaggatgacgaaaaccttgaaagcgattacttcggcaagctcgagtcgaagttgtctgtgattaggaatctcaacgatcaggtccttttcattgaccaaggcaacagacctctgtttgaggatatgaccgatagcgattgccgagacaatgcaccccgaactatctttatcatttcgatgtataaggattctcaaccgcgcggaatggcagtgactatttcagtgaagtgcgaaaagatatcaaccttgagctgtgaaaacaagattatcagtttcaaggagatgaatcccccggataacattaaggacaccaaaagcgacattatcttttttcagcggagcgtccctggtcatgataacaagatgcaatttgagtctagctcgtacgagggatactttcttgcttgtgaaaaggaacgggacctgtttaaacttattctgaagaaagaggatgaactcggcgatagatccattatgtttactgtccagaatgaagat

SEQ ID NO: 33234 - DNA, 579 bp, synthetic construct
  misc_feature 1..579: note = Description of Artificial Sequence: Synthetic coding sequence
  source 1..579: mol_type = other DNA
atggcagccgagccagtggaggacaactgcatcaacttcgtggcgatgaaattcatcgataacactctgtactttatcgcggaagatgacgaaaatctggaatcagactacttcggaaaacttgagagcaagctgtcagttatcagaaacttgaatgatcaagtcctcttcatcgaccagggaaatagaccgctgttcgaagatatgactgactcggattgccgcgacaacgccccccgcaccatctttatcatcagcatgtataaggactcccagccgcgcggaatggccgtgactatttccgtgaaatgcgaaaagatctcgaccctctcctgtgagaacaaaattatctccttcaaggagatgaaccctccagacaatattaaggacacgaagtctgatattatcttcttccagcggagcgtgccgggccacgataataagatgcaattcgaatcgagctcgtacgaagggtactttctggcttgcgagaaggaacgggacctgttcaagctcatcctgaaaaaggaggatgaactcggtgacaggtcaatcatgtttaccgtccagaacgaggac

SEQ ID NO: 33235 - DNA, 579 bp, synthetic construct
  misc_feature 1..579: note = Description of Artificial Sequence: Synthetic coding sequence
  source 1..579: mol_type = other DNA
atggctgccgagcccgtcgaagacaattgcatcaacttcgtggcaatgaaatttatcgataataccctctatttcattgccgaggacgacgaaaatctcgagtctgattattttgggaaattggaaagcaagctgagcgttatccgaaatttgaacgatcaggtgctgttcatcgaccaaggaaaccgcccgttgtttgaggacatgaccgactccgattgccgagacaatgcaccgaggacaattttcatcatttcgatgtacaaggactctcagccccgtggtatggctgtgacaatctccgtgaagtgtgagaaaatatcgaccctgtcttgcgaaaataaaatcatatcatttaaagaaatgaaccccccggataatattaaggacacgaagtcagacataattttcttccagcgttcagtgccgggtcacgacaataaaatgcagttcgaatcgtccagctatgaaggctacttcttggcgtgtgagaaagagagggacctgtttaagctgatcctcaagaaagaggacgaactaggcgacagaagtatcatgtttacagtgcagaacgaagac

SEQ ID NO: 33236 - DNA, 579 bp, synthetic construct
  misc_feature 1..579: note = Description of Artificial Sequence: Synthetic coding sequence
  source 1..579: mol_type = other DNA
atggccgccgagccagttgaggacaactgcatcaatttcgtggccatgaaattcatagacaatacactgtatttcatcgccgaagacgacgagaatctggaaagcgattatttcggaaagttggagagtaagctgagcgtgatacgcaatttgaatgaccaggttttgtttatagaccaagggaataggccactgtttgaagatatgaccgatagcgactgccgcgataatgcccctcggaccatctttatcatttcaatgtacaaggactcacaaccccgcggcatggcagttaccatctcagttaagtgcgaaaagatctctacactgtcatgcgagaataaaatcatttccttcaaggagatgaatcctcccgacaacatcaaagataccaagtccgatattatcttcttccaacgctctgtaccgggacacgacaataaaatgcagtttgagagttctagctatgaggggtatttcctcgcctgtgaaaaagaaagagaccttttcaagctgattcttaaaaaagaggacgagttgggtgatcgctccataatgtttacagtgcagaacgaggat

SEQ ID NO: 33237 - DNA, 579 bp, synthetic construct
  misc_feature 1..579: note = Description of Artificial Sequence: Synthetic coding sequence
  source 1..579: mol_type = other DNA
atggccgctgagcctgtggaagataactgtatcaattttgtcgctatgaagtttatcgataacacactgtattttatcgcagaagatgacgagaacctagaatcagattactttggaaagttagagagtaagttgtcagttataaggaacctcaacgaccaggtcctctttatcgaccaaggtaaccgacctctgtttgaagatatgactgatagcgactgtagggataacgctccccggacaatctttatcattagcatgtacaaagactcccaacccagaggcatggcagtgactatcagcgtgaagtgcgagaaaatctccacactgagctgtgagaacaagattatcagctttaaggaaatgaacccaccggacaatatcaaggatactaaaagtgacataatcttctttcaaagatctgtccccggacacgacaacaagatgcagtttgagtccagttcgtatgagggctattttcttgcttgcgagaaagagagagaccttttcaaactgatacttaagaaagaagatgagttgggggatcgatccatcatgttcaccgtccagaacgaagat

SEQ ID NO: 33238 - DNA, 579 bp, synthetic construct
  misc_feature 1..579: note = Description of Artificial Sequence: Synthetic coding sequence
  source 1..579: mol_type = other DNA
atggctgcagaaccagttgaagataattgtattaattttgtagctatgaaatttattgataatacactttattttattgctgaagatgacgaaaatcttgaaagtgattattttggaaaattagaaagtaagctcagtgttattcgtaaccttaatgatcaagtactctttattgaccaaggaaatagacctttatttgaagatatgacagattcagattgtagagataatgcaccaaggactatatttattattagtatgtataaagactcacaaccaagaggtatggctgtaacaatatctgttaaatgtgaaaagattagtacactttcatgtgaaaataaaattatatcttttaaggaaatgaatccaccagataatataaaagatacaaaaagtgatattatattctttcaacgttcagtaccaggtcatgacaataaaatgcaatttgaaagtagttcttatgaaggatattttttagcatgcgaaaaagaaagagacctttttaaattaattttaaaaaaagaagatgaactaggagatagaagtattatgtttacagttcaaaatgaagat

SEQ ID NO: 33239 - DNA, 579 bp, synthetic construct
  misc_feature 1..579: note = Description of Artificial Sequence: Synthetic coding sequence
  source 1..579: mol_type = other DNA
atggcagctgaaccggtggaggacaattgtattaactttgtggccatgaagttcatcgacaatacgctgtacttcattgctgaggatgatgaaaacctcgaatccgactatttcggaaaactcgagagcaaactctctgtgatccgcaaccttaacgatcaagtgctgtttatcgaccaaggtaatcggccgctgtttgaggatatgaccgactcggattgccgggacaacgcgccgcgtactatcttcatcatttccatgtacaaggacagccaacctcgggggatggcggtcactatttccgtgaagtgcgagaaaatctcgactctgtcatgcgagaacaagatcatctccttcaaagaaatgaacccgccagacaacattaaggacactaagagcgacatcatctttttccaaaggtccgtgccaggacacgacaacaaaatgcaattcgaaagctcgtcgtacgaaggatacttcctcgcgtgcgaaaaggaaagagatttgttcaaactgatcctgaagaaggaggacgaactgggagatcggagcatcatgttcaccgtccaaaacgaagat

SEQ ID NO: 33240 - DNA, 579 bp, synthetic construct
  misc_feature 1..579: note = Description of Artificial Sequence: Synthetic coding sequence
  source 1..579: mol_type = other DNA
atggccgccgaaccagttgaagacaattgtatcaactttgtggctatgaaatttatcgataatacactctacttcatcgctgaggacgatgagaacctagaatctgattacttcggtaagttggagagcaagctgagcgtaattcggaatctgaatgatcaagtacttttcattgatcagggaaaccgcccattattcgaggatatgacagattcagactgtagagataacgctccgcgaaccatctttataatttcaatgtataaggatagccagccccggggcatggcagtgactatttctgtgaagtgtgagaaaatctctaccctgtcgtgcgaaaataagataattagctttaaggagatgaaccccccggacaacattaaagatacgaagagcgacatcatcttcttccagcgatcggtccctggacatgacaataaaatgcaattcgagagctcaagctacgaaggctatttcctagcttgcgagaaagaacgtgacctgtttaagcttatccttaagaaggaggacgagttgggcgatcggtccattatgtttaccgtgcagaacgaagac

SEQ ID NO: 33241 - DNA, 579 bp, synthetic construct
  misc_feature 1..579: note = Description of Artificial Sequence: Synthetic coding sequence
  source 1..579: mol_type = other DNA
atggctgcagaacctgtcgaagacaattgcattaatttcgtcgctatgaagtttatcgataatacactttattttatcgccgaagacgacgaaaacctggagtctgattacttcggcaagctggagagtaagttgagtgttataagaaacctgaacgaccaggtcctcttcatcgaccagggaaatcggcccctgtttgaggatatgaccgacagcgactgccgcgacaacgcccctcggactatctttatcataagtatgtacaaggactctcagcctcgaggaatggctgtgactatttcagtgaaatgcgagaagattagcactctgtcttgtgagaacaaaatcatttcattcaaagagatgaaccctcctgataacatcaaagatactaagagtgacataatcttctttcagcggtccgtgcctggccacgacaacaaaatgcagttcgaaagttcttcctacgagggttactttctggcgtgtgaaaaagaacgcgacctgtttaagctgatactcaaaaaggaagacgagttgggtgacagatccattatgttcacagtgcagaatgaagat

SEQ ID NO: 33242 - DNA, 579 bp, synthetic construct
  misc_feature 1..579: note = Description of Artificial Sequence: Synthetic coding sequence
  source 1..579: mol_type = other DNA
atggctgccgagcccgtggaagataattgcataaattttgtggccatgaaattcattgataatacgctctatttcattgccgaggatgatgaaaatcttgaatcagattatttcggaaaattggagtcaaaactcagtgtgattagaaacctgaatgatcaggttctatttatcgatcaggggaatagacccctattcgaagatatgactgatagtgattgccgagacaacgctccacggactatctttataatttctatgtataaagattcacagcccagggggatggcagtgacaattagtgtgaagtgtgagaaaatatccacacttagttgtgagaataaaataatctcttttaaagaaatgaaccccccagataacatcaaagatactaaatccgatatcatttttttccaaagaagtgtaccaggacatgataataaaatgcagtttgaatccagttcatacgaagggtatttcctcgcctgtgagaaagaaagagatctcttcaaactgatcctcaagaaagaagatgaactaggagacaggagtatcatgttcactgttcaaaatgaagac

SEQ ID NO: 33243 - DNA, 579 bp, synthetic construct
  misc_feature 1..579: note = Description of Artificial Sequence: Synthetic coding sequence
  source 1..579: mol_type = other DNA
atggcggcggaaccggtggaagataattgtatcaatttcgtcgctatgaagttcatcgacaacactctttacttcatcgccgaggacgatgagaatctcgaatctgactacttcggaaaactcgagtcgaaactgtcagtcatccgtaacctgaacgaccaggtgttgtttatcgaccaggggaaccggccactgttcgaagatatgaccgacagcgactgccgggataacgcccctcgcacgatcttcatcatctcgatgtataaagactcccaaccacgcggcatggcggtgaccatttcagtcaaatgcgaaaagatcagcacgctgtcctgcgagaacaagatcatctctttcaaggaaatgaacccgccggacaacattaaggatacgaaatccgacataatctttttccagagatccgtgcccggccacgacaacaagatgcaatttgaatcctcgtcctacgaggggtactttctcgcgtgcgagaaggaaagagatcttttcaagctgatccttaagaaggaagatgagctgggtgaccggagcatcatgttcactgtgcaaaatgaggat

SEQ ID NO: 33244 - DNA, 579 bp, synthetic construct
  misc_feature 1..579: note = Description of Artificial Sequence: Synthetic coding sequence
  source 1..579: mol_type = other DNA
atggctgccgaacctgttgaagataattgtattaactttgtcgccatgaagtttattgacaacacgctttactttattgcggaagatgacgaaaacttggagtcggactattttggtaaactggaatctaagctgtcggtcattagaaaccttaatgatcaagtgctgtttatcgaccagggcaatcggccactcttcgaagatatgaccgactcagactgtagagacaacgcacctcggacgattttcatcattagcatgtacaaggattcccaacctcgtggaatggccgtcaccatctcggtaaagtgtgagaagatcagtactttgtcatgcgagaataagatcatttcgttcaaggagatgaacccacccgataacattaaagatactaagtccgatatcattttcttccaacgctcagtgcccggacatgacaacaagatgcaatttgaaagctcctcgtacgaaggttactttctcgcgtgcgaaaaggagcgagatcttttcaagctcattttgaaaaaagaagatgaacttggagataggtcgataatgttcaccgtgcagaacgaggat

SEQ ID NO: 33245 - DNA, 579 bp, synthetic construct
  misc_feature 1..579: note = Description of Artificial Sequence: Synthetic coding sequence
  source 1..579: mol_type = other DNA
atggcagccgagccagttgaggataactgtataaacttcgtggcgatgaaattcatagataataccctgtactttattgcagaagatgacgaaaatctcgaaagcgactactttggaaagctggaatccaagctgtcagtcattcgaaacctcaatgatcaggttctgtttattgaccaaggtaataggcctttgttcgaggacatgaccgattcggattgccgcgataatgcaccaaggactatattcatcatttccatgtataaagattctcaaccacgcggaatggccgtgaccatttccgtgaagtgtgagaaaatcagcactctgtcctgtgagaacaagatcatttcctttaaagagatgaatccgccagacaacatcaaagacacgaagtcggacattatcttcttccaaagatccgttcccgggcatgataacaaaatgcagttcgaaagctcatcatacgaaggttactttcttgcatgcgaaaaggaaagagatctgtttaagctgattttgaagaaggaggacgagctcggagataggtcaatcatgtttactgtccagaacgaggat

SEQ ID NO: 33246 - DNA, 579 bp, synthetic construct
  misc_feature 1..579: note = Description of Artificial Sequence: Synthetic coding sequence
  source 1..579: mol_type = other DNA
atggctgccgagcccgtggaggataactgtatcaatttcgtagccatgaagttcatcgacaatacactgtacttcattgctgaggatgacgagaacctggaaagcgactatttcgggaagcttgaatctaagctgtcagtgatccgcaacctgaacgatcaggttctttttattgatcaaggaaatagaccactttttgaagacatgaccgattcggactgtcgcgataatgctccacggactatcttcatcattagcatgtacaaggactctcaacccaggggcatggccgtcactatctcggtgaagtgcgagaagatctccaccctgagttgcgagaacaaaatcatctctttcaaagagatgaacccacccgataatatcaaagacacaaaaagtgatataatcttcttccagcgctccgtgcccggacacgacaataagatgcagtttgagtcttccagctacgagggatattttttggcatgtgaaaaggaacgggatctgtttaagctgattctaaaaaaggaggacgaactgggcgaccgtagcattatgttcactgtccagaacgaggat

SEQ ID NO: 33247 - DNA, 579 bp, synthetic construct
  misc_feature 1..579: note = Description of Artificial Sequence: Synthetic coding sequence
  source 1..579: mol_type = other DNA
atggccgcagagccggtggaggacaactgtatcaactttgtggccatgaaattcatcgacaacaccctgtactttattgctgaggacgacgagaatctcgaatccgattacttcggcaagctggagtccaagctgtccgtaatccgcaacttgaatgaccaagtgctcttcattgatcagggaaataggccactgttcgaagatatgactgactcggattgccgagacaatgctccgagaaccatctttatcatatcgatgtacaaagacagccagccaagaggaatggcggtaaccatctcggtgaagtgcgagaaaatctctactcttagctgcgagaataagatcatctcgttcaaagaaatgaaccctccggacaacattaaggataccaagtccgatatcatctttttccagcgctcggtgcctggtcatgataacaagatgcaatttgaatcatctagttatgaaggatacttcctggcatgcgaaaaagaacgcgacctgttcaagctcatcctgaagaaggaagatgagttgggcgatcggtcgattatgttcactgtgcagaacgaagat

SEQ ID NO: 33248 - DNA, 579 bp, synthetic construct
  misc_feature 1..579: note = Description of Artificial Sequence: Synthetic coding sequence
  source 1..579: mol_type = other DNA
atggccgctgaacccgtggaagataattgcatcaattttgtggcgatgaagttcattgataacactctctacttcatcgcagaggatgatgaaaacttggaatcggactactttggtaaactggaaagcaaactgtcagtgattcgcaatctgaacgatcaggtccttttcatcgaccagggaaatcgtccgctgttcgaagatatgaccgactccgattgccgagacaacgccccgcgcaccattttcattatcagcatgtataaagactcccagcctagagggatggcagtaactatctcagtaaaatgcgaaaagatatcgactctcagctgtgagaataagattatctcatttaaggagatgaacccccctgacaacatcaaggacaccaagtctgacatcattttcttccaacggtccgtcccaggccacgacaacaagatgcagtttgagtcgagctcatacgagggatacttcctggcctgtgagaaggaaagggacttgtttaagttgatcctgaaaaaggaggacgaacttggtgacagatcgatcatgttcacggtccaaaacgaggac

SEQ ID NO: 33249 - DNA, 579 bp, synthetic construct
  misc_feature 1..579: note = Description of Artificial Sequence: Synthetic coding sequence
  source 1..579: mol_type = other DNA
atggcggccgaaccggttgaagacaactgtataaattttgttgccatgaaatttattgataataccctgtactttattgcggaggacgacgagaacctggagtcggattacttcgggaagctagaatctaagttgagtgtcatccgaaacctgaatgaccaagtcctttttatcgatcaaggaaatcgacctctgttcgaggacatgaccgactcagattgcagggacaatgcaccacgaaccatttttataatcagtatgtataaggactcccagccgcggggtatggcagtcaccattagcgtaaagtgtgaaaaaatcagtaccctatcgtgtgagaataagatcatctcctttaaggaaatgaaccctcccgacaatatcaaagacactaagtcggacatcatttttttccaaagatcggtaccaggtcatgataacaagatgcaattcgaatcttcctcatatgaaggttacttcctcgcatgcgaaaaggaacgggatttgttcaagctaatcttgaaaaaagaggatgagcttggtgatcgtagcatcatgtttacggtacagaacgaggac

SEQ ID NO: 33250 - DNA, 579 bp, synthetic construct
  misc_feature 1..579: note = Description of Artificial Sequence: Synthetic coding sequence
  source 1..579: mol_type = other DNA
atggccgccgagccagtggaagacaactgcataaactttgtggctatgaaatttattgacaataccctgtatttcattgctgaagacgatgagaacctagaatccgactattttggtaaactggagtccaagctatccgtgattcgaaaccttaatgatcaagtcttgttcatcgaccaggggaatcggccgctcttcgaagacatgaccgacagcgactgtcgggataacgccccacggactatattcattatttcaatgtacaaggacagccagccaagagggatggccgtgacaatcagcgtgaagtgtgagaagatttcaacacttagctgcgagaacaaaataatcagtttcaaggagatgaatccccctgataatattaaggacacaaaatcagacatcatattttttcagcggtccgtgcctgggcatgataacaagatgcagttcgaatccagctcctacgagggttatttcctggcctgtgaaaaggaaagggacttattcaagctgattctcaagaaggaagacgagctgggtgataggtcgatcatgtttacggtgcagaacgaagac

SEQ ID NO: 33251 - DNA, 579 bp, synthetic construct
  misc_feature 1..579: note = Description of Artificial Sequence: Synthetic coding sequence
  source 1..579: mol_type = other DNA
atggcagcagaaccagtagaagacaattgtattaatttcgtagctatgaagtttattgataataccctctactttatcgcggaggacgatgaaaatttagaaagcgactattttggaaagcttgaatcaaagctttcagtaattcgcaatctcaatgatcaagtattgttcatcgatcaaggaaatagaccgctctttgaagacatgacagattccgattgtcgcgataatgcaccgcgaacgatttttatcattagcatgtataaagattcccagccacgcggaatggcggttaccatttctgttaaatgcgaaaaaattagcacactctcttgcgagaataaaattattagttttaaagagatgaatccgccagacaatatcaaagatacaaaatctgatattattttttttcagcggtcggtaccgggacatgataacaagatgcaatttgaatcgtcgtcttacgaaggctacttcttagcctgtgaaaaagaaagagatctgtttaagttgattctgaagaaagaagatgagttgggagatcgtagcattatgtttacagtacaaaatgaggat

SEQ ID NO: 33252 - DNA, 579 bp, synthetic construct
  misc_feature 1..579: note = Description of Artificial Sequence: Synthetic coding sequence
  source 1..579: mol_type = other DNA
atggcagctgagcccgtagaggataattgcatcaatttcgtggctatgaagtttatagataacactctttactttatcgctgaagatgatgaaaacctggaatccgattacttcgggaaactcgaatcaaaactgtcggtgatccggaaccttaatgatcaggtgttgttcatagatcagggaaaccgaccactcttcgaagatatgacagattcagattgccgggataacgctcctagaactatcttcataatcagtatgtacaaagacagtcagcctagggggatggcagtgacaatcagtgtgaaatgcgagaagatctctactctttcctgtgaaaataaaataatctcctttaaagaaatgaatccaccagataacataaaagatactaaatcagatatcatattctttcagcgatccgtccctgggcacgataataaaatgcagttcgaatcttcatcctatgagggatacttcctcgcctgcgaaaaggaacgcgacctctttaaactaatactcaagaaggaagatgaactcggagatcggtccatcatgtttactgtgcagaatgaagac

SEQ ID NO: 33253 - DNA, 579 bp, synthetic construct
  misc_feature 1..579: note = Description of Artificial Sequence: Synthetic coding sequence
  source 1..579: mol_type = other DNA
atggcagccgaacctgtggaggataattgtataaacttcgtggctatgaagtttatcgataataccctttactttattgcagaggacgatgaaaaccttgaatccgattactttggcaagctggagtcaaaactttcagtcattagaaacctgaatgatcaggtcctgtttatcgatcaagggaaccgcccgctctttgaggatatgactgattccgattgcagggataatgccccacggactattttcattatctccatgtacaaggactcacaaccacgaggaatggcagtgacgatctcagtcaaatgtgagaaaatctcgactctttcctgcgagaacaagatcatttcgttcaaggaaatgaaccctcccgataacataaaggataccaaatccgatatcatcttcttccaacgaagcgtccctggtcatgataacaagatgcaattcgagagctcatcctacgaagggtactttctcgcatgtgagaaggaacgcgatcttttcaaacttattctcaagaaggaagatgaattgggggatagatcaattatgtttaccgtgcaaaatgaagat

SEQ ID NO: 33254 - DNA, 579 bp, synthetic construct
  misc_feature 1..579: note = Description of Artificial Sequence: Synthetic coding sequence
  source 1..579: mol_type = other DNA
atggccgctgagcctgtggaagacaattgtattaacttcgtggctatgaagttcatcgataacactctttacttcatcgcagaggatgacgaaaacctggaatccgattacttcgggaagttggaatctaaactctcggtgattcgaaatcttaatgaccaggtgttgttcatcgaccagggaaataggcccctgtttgaagacatgaccgatagtgactgcagagacaatgccccccgcactatcttcattataagcatgtacaaggacagccaacctagaggtatggccgtaactatcagtgttaagtgtgaaaagatatccactctcagttgtgagaataagattataagcttcaaggaaatgaacccgcctgataacatcaaagacaccaaaagtgacatcatctttttccagagatccgttccaggacacgataacaagatgcagttcgagtcgtcctcctatgagggttactttcttgcctgtgaaaaggagagagacttgttcaagctcatcctgaagaaggaggatgaacttggagaccgcagtattatgttcactgtacagaacgaggac

SEQ ID NO: 33255 - DNA, 579 bp, synthetic construct
  misc_feature 1..579: note = Description of Artificial Sequence: Synthetic coding sequence
  source 1..579: mol_type = other DNA
atggccgctgaaccagtcgaggacaattgcattaactttgtggccatgaaattcatagataataccctctacttcatcgctgaagatgacgagaacctggagtcggattacttcggaaagctggagtcaaagttgtcggtcatccgcaacttgaatgatcaggtgctcttcatcgaccagggaaatcggccgttgttcgaggacatgacggacagcgactgccgcgacaatgccccgaggactatctttatcatctcaatgtacaaagatagccaacctcgcgggatggctgtgactatttcggtgaagtgcgaaaagattagcactctctcgtgtgaaaacaaaatcatcagcttcaaagagatgaacccacccgataacatcaaggacactaagtccgacatcatcttttttcaacggagcgtcccgggtcacgacaacaagatgcagttcgagtcctcatcctatgaaggatacttcctggcatgcgaaaaggaacgggatctgttcaagctgatactgaaaaaggaggacgaacttggcgatagatccatcatgtttacggtgcagaacgaagat

SEQ ID NO: 33256 - DNA, 579 bp, synthetic construct
  misc_feature 1..579: note = Description of Artificial Sequence: Synthetic coding sequence
  source 1..579: mol_type = other DNA
atggctgcagaacccgttgaagataattgtattaactttgtcgccatgaagttcattgataataccctctacttcatcgcggaagatgatgaaaatcttgaatctgactattttggaaagcttgagagcaaactgtctgtgattagaaacctcaacgatcaagtgctgtttatagaccagggcaatcggcctctattcgaggacatgacagacagcgattgccgtgataacgctccacgcactatattcatcatcagcatgtacaaggattcacagcctcgtggcatggcagtcaccattagcgtgaagtgcgaaaagatttcaacattgtcctgtgagaataagatcatctccttcaaggagatgaaccctcccgataatataaaggacaccaagtcagatatcatcttttttcagagatctgtacccggacatgataataagatgcagttcgaatcgagctcttatgagggttattttttggcgtgtgagaaagaaagagatctgttcaagcttatcttaaaaaaggaggatgagctcggggaccggagtataatgtttacagtgcagaatgaagat

SEQ ID NO: 33257 - DNA, 579 bp, synthetic construct
  misc_feature 1..579: note = Description of Artificial Sequence: Synthetic coding sequence
  source 1..579: mol_type = other DNA
atggccgcggaaccggtcgaagacaattgtattaattttgtcgcgatgaaattcatcgataacactctgtacttcattgcagaggatgacgagaatctcgagagcgactacttcggtaaacttgagtccaagttatcagtcatccgcaacctgaacgatcaggttctgttcatcgatcagggtaatcggcccctcttcgaagacatgactgacagcgactgcagggacaacgcgccgaggacaatttttatcataagtatgtacaaggactcacaacctcggggcatggcagtcacgatctcagtaaagtgcgagaagatttccacactctcttgcgagaataagatcattagcttcaaggagatgaatcctcctgacaatattaaagatacaaaatctgacatcatcttcttccagcgatccgttccagggcacgacaataagatgcagttcgagagtagttcatacgaaggctattttttggcctgtgagaaagaacgggacctattcaagctgatattgaaaaaggaggatgagttgggagatagatctattatgttcacggtgcagaatgaagac

SEQ ID NO: 33258 - DNA, 579 bp, synthetic construct
  misc_feature 1..579: note = Description of Artificial Sequence: Synthetic coding sequence
  source 1..579: mol_type = other DNA
atggcagcggagcccgtcgaagacaactgtataaacttcgttgctatgaaattcatcgacaacaccctctatttcattgctgaggacgacgagaacctggaaagtgactacttcgggaaactggagagtaagttatccgtcatcaggaacctcaacgatcaggtgctatttatcgatcagggaaaccggccgctgtttgaggacatgaccgatagtgattgtagggacaatgcaccccgaacaatcttcattatctctatgtataaggattcgcagcctcgcgggatggccgtgacaatcagcgtgaagtgtgagaagatatcaaccctttcgtgtgagaataagattataagcttcaaagagatgaatcctccagataatataaaggatacaaaatctgatatcattttctttcagcgatccgttcccggacatgacaacaaaatgcagtttgaaagttcctcttacgagggatatttcctagcctgtgagaaggagagagacttgttcaagctgatcctgaagaaggaagacgagcttggggaccggagcatcatgtttactgtccagaatgaggat

SEQ ID NO: 33259 - DNA, 579 bp, synthetic construct
  misc_feature 1..579: note = Description of Artificial Sequence: Synthetic coding sequence
  source 1..579: mol_type = other DNA
atggcagcggaacccgtcgaggacaattgcatcaacttcgtggctatgaagttcatcgataacaccctgtacttcatcgccgaggacgacgaaaacctggaatcagactacttcggaaagctcgagagcaaactgtctgtgatcaggaatctgaatgaccaagtgctcttcattgaccagggtaatcgcccgctcttcgaagatatgaccgacagcgactgccgcgacaacgcccctagaaccatcttcattatctcgatgtacaaagatagccagcctcggggcatggcggtgaccatctcggtgaagtgtgagaaaatctctacccttagctgcgagaataagatcatctccttcaaggaaatgaacccaccagacaatatcaaggacactaaaagtgacatcattttcttccagcggagcgtccctggccacgacaacaaaatgcaattcgaatcgtcgagctacgagggctactttctggcctgtgaaaaggaacgagatctgttcaagttgattctcaagaaggaagatgagctgggcgaccgcagcatcatgttcacggtccaaaacgaggat

SEQ ID NO: 33260 - DNA, 579 bp, synthetic construct
  misc_feature 1..579: note = Description of Artificial Sequence: Synthetic coding sequence
  source 1..579: mol_type = other DNA
atggcagcagagcccgttgaagacaactgtattaacttcgtggctatgaaatttatagataatacactgtacttcattgccgaggatgatgagaacctggagtctgactacttcggaaaactcgaatccaaattgtcagttatacgtaacctcaatgatcaggttctcttcattgatcagggtaaccgcccattgttcgaggatatgaccgactctgattgtcgtgataatgccccccgcaccatctttattatctccatgtacaaggacagtcagccacgtggtatggctgtaacaataagcgtcaaatgcgagaagatctcaacactgtcttgcgagaataagatcatttcttttaaggagatgaatcctcccgataacattaaagacaccaagtcagatattatcttttttcagaggtctgtgcctggccacgacaacaagatgcaatttgaatccagttcatacgaaggttactttctggcctgtgaaaaagagcgcgaccttttcaaattgatcctcaaaaaggaggacgagttgggtgatagaagcattatgtttaccgtgcagaacgaggat

SEQ ID NO: 33261 - DNA, 579 bp, synthetic construct
  misc_feature 1..579: note = Description of Artificial Sequence: Synthetic coding sequence
  source 1..579: mol_type = other DNA
atggcagctgaacccgtcgaggataactgcatcaacttcgtggcgatgaagtttatcgataacaccctgtacttcatcgccgaagatgatgagaatcttgaatcagactacttcggaaagctggaatccaagctgtcggtgattaggaacttgaacgatcaagtgctctttatcgaccaggggaatcgaccgctgttcgaggatatgactgactccgactgccgcgacaatgctccgaggacgatcttcataatctcgatgtacaaggacagccagccgagaggaatggccgtcactatctctgtgaagtgcgaaaagatctcaactctgtcgtgcgagaataagatcatctcgtttaaggaaatgaacccaccagataacattaaggacaccaaaagcgacatcattttcttccagcggtcggtccccggccacgacaacaaaatgcaatttgagtctagttcatacgaaggatatttcttggcatgtgagaaggaacgcgacctgttcaaattgatccttaagaaagaggacgaattgggtgaccggtctattatgttcaccgtgcagaacgaagat

SEQ ID NO: 33262 - DNA, 579 bp, synthetic construct
  misc_feature 1..579: note = Description of Artificial Sequence: Synthetic coding sequence
  source 1..579: mol_type = other DNA
atggcagcagaaccggtggaggataattgcattaactttgtcgccatgaagtttatcgacaacacgctgtactttatcgctgaggatgatgaaaacctcgaatccgattacttcggaaaattggaatcaaagttgtcggtcattaggaacctgaatgaccaggtgctgttcatcgaccagggcaatcgccccctctttgaggacatgacggacagcgattgcagggacaatgctccgcgcactattttcatcatttcgatgtacaaggattcgcagccacggggaatggccgtgacgatctcagtcaagtgcgagaaaatctccaccctgtcatgtgaaaacaaaatcatctcgtttaaagagatgaatcctccagacaacatcaaggacaccaagtccgacatcatcttcttccagcggagcgtgcctggtcatgacaacaagatgcaattcgaatcatctagctacgagggatacttcctggcttgtgagaaggaaagggatctctttaagctgatcctgaagaaggaggacgaactcggagatcggtcgatcatgttcactgtccagaatgaggac

SEQ ID NO: 33263 - DNA, 579 bp, synthetic construct
  misc_feature 1..579: note = Description of Artificial Sequence: Synthetic coding sequence
  source 1..579: mol_type = other DNA
atggctgctgaaccagttgaggacaattgcattaacttcgtggccatgaagtttatagataacaccctttactttatagcagaggatgacgaaaacctggaatcggattactttggcaagttggagtcgaaactctcagtcattcgcaatcttaatgatcaggtcctcttcatcgatcagggaaaccgtccccttttcgaagatatgaccgacagcgactgtagagacaatgcaccgcgaactatctttatcatttccatgtacaaggattcgcaaccgagaggaatggccgtgaccatcagcgtcaagtgtgaaaagatatctactctgagctgcgaaaacaagatcatctcattcaaagagatgaaccctcctgacaatatcaaggacactaaaagcgacattatctttttccaacggtccgtgcctgggcacgataacaaaatgcaatttgaatcatcctcatatgaaggctacttccttgcatgtgagaaggagagagatctctttaaacttattctgaagaaggaggacgaattgggtgatcgttccatcatgtttactgtgcagaacgaagat

SEQ ID NO: 33264 - DNA, 579 bp, synthetic construct
  misc_feature 1..579: note = Description of Artificial Sequence: Synthetic coding sequence
  source 1..579: mol_type = other DNA
atggcagctgagcctgtggaagataactgcatcaatttcgtcgccatgaagttcatagataatacactgtacttcattgccgaagatgatgagaacctcgaatccgactatttcggaaaattggagtctaagctgtctgtaatacggaacttgaatgatcaggtcttgttcattgatcaaggtaaccggcccctttttgaggacatgacagattcagactgtcgcgacaacgcccctcgaaccatattcatcattagcatgtataaggacagccagccacgcggaatggcagtgacaattagtgtcaaatgtgagaagataagtacccttagctgcgagaacaagatcatctcttttaaggaaatgaacccccctgacaacattaaggacacgaagtccgacataatcttctttcagcgttcagtacccggtcatgacaataagatgcagtttgagtcatcttcgtatgagggctacttcctggcctgtgagaaagagagggacctgtttaagctgatcctgaagaaggaagacgagcttggtgatcgttccattatgttcaccgttcagaacgaggat

SEQ ID NO: 33265 - DNA, 579 bp, synthetic construct
  misc_feature 1..579: note = Description of Artificial Sequence: Synthetic coding sequence
  source 1..579: mol_type = other DNA
atggcagccgaacctgtcgaagataattgcattaactttgttgcaatgaaattcatagacaacaccttgtacttcattgcagaagatgatgagaatcttgaatccgattactttggtaaactggagtcgaaactttcggtgatcagaaacctgaacgatcaggtgttgttcatagaccaaggcaaccgtccactgtttgaagatatgaccgatagcgattgtcgtgataacgcgcctcgcaccatcttcatcataagcatgtacaaggatagccagcctcggggtatggcagtcacgatttcggtgaagtgtgaaaagatcagcacgcttagctgcgaaaacaagattatcagctttaaggaaatgaatcccccagacaatatcaaagacactaaatctgacatcatcttttttcaaagatccgttccaggacatgataacaagatgcaatttgaaagctcctcctatgaaggatactttctcgcctgtgagaaagagcgcgacctctttaagctgattctcaagaaagaagatgaactgggagatcgaagcataatgtttaccgtgcaaaacgaagat

SEQ ID NO: 33266 - DNA, 579 bp, synthetic construct
  misc_feature 1..579: note = Description of Artificial Sequence: Synthetic coding sequence
  source 1..579: mol_type = other DNA
atggctgcagagcctgttgaggataattgtatcaacttcgtcgctatgaaattcatcgataacaccctgtactttatagctgaggatgatgaaaacctggaatccgattatttcggcaaattggagtccaaattgagtgtgatcaggaaccttaatgatcaggtactattcatcgaccagggcaaccggcctctcttcgaagacatgactgattccgattgtagagacaacgctccgcggactatctttataatatctatgtacaaagatagtcagccacgagggatggccgtaactatcagcgtcaagtgcgaaaaaatctctactctcagctgtgagaacaagatcatctcttttaaggaaatgaacccaccagataacatcaaagatacgaagtcagatattatattttttcaacggagtgtgcctggacatgataataagatgcaatttgagtcttcttcctatgaaggctatttcctcgcatgcgagaaggaaagggatctgtttaaactcatcctgaagaaagaagacgaactcggagacaggtcaattatgttcactgttcagaacgaggat

SEQ ID NO: 33267 - DNA, 579 bp, synthetic construct
  misc_feature 1..579: note = Description of Artificial Sequence: Synthetic coding sequence
  source 1..579: mol_type = other DNA
atggcggcggaaccggtagaagataattgtataaattttgttgcgatgaaatttatagataatacgttatattttatagcggaagatgatgaaaatctagaatcggattattttggtaaattagaatcgaaactatcggttatacgaaatctaaatgatcaagtattatttatagatcaaggtaatcgtccgctatttgaagatatgacggattcggattgtcgagataatgcgccgcgaacgatatttataatatcgatgtataaagattcgcaaccgcgaggtatggcggttacgatatcggtaaaatgtgaaaaaatatcgacgctatcgtgtgaaaataaaataatatcgtttaaagaaatgaatccgccggataatataaaagatacgaaatcggatataatattttttcaacgttcggtaccgggtcatgataataaaatgcaatttgaatcgtcgtcgtatgaaggttattttttagcgtgtgaaaaagaacgtgatctatttaaactaatactaaaaaaagaagatgaattaggtgatcgttcgataatgtttacggtacaaaatgaagat

SEQ ID NO: 33268 - DNA, 579 bp, synthetic construct
  misc_feature 1..579: note = Description of Artificial Sequence: Synthetic coding sequence
  source 1..579: mol_type = other DNA
atggctgccgaacccgttgaagataattgcatcaactttgttgcgatgaagttcattgataatacattatatttcatcgccgaagacgatgaaaacctcgagtccgactattttggtaagttggaaagtaagctcagcgtgatccgcaatctgaacgaccaagtgctttttatcgatcagggcaacaggcctttatttgaggatatgacagattccgactgccgggataacgcccctaggactatttttattatcagcatgtacaaggacagccagccaaggggtatggccgtcaccatctctgtgaagtgtgagaagatctctacgctgtcttgtgagaacaaaattatttcatttaaggaaatgaacccgcctgataacataaaggacactaaatcagacatcatatttttccagaggtctgtgcccggccacgacaacaaaatgcagttcgagtctagttcttacgaagggtacttcctggcctgtgagaaagagcgcgatctattcaaactgattctaaagaaagaagatgagctgggcgaccgcagtattatgttcaccgtgcagaacgaggac

SEQ ID NO: 33269 - DNA, 579 bp, synthetic construct
  misc_feature 1..579: note = Description of Artificial Sequence: Synthetic coding sequence
  source 1..579: mol_type = other DNA
atggccgccgaaccagtcgaagacaactgcattaactttgtggcaatgaagttcatcgacaacacactctattttattgccgaggacgatgagaacctggaatcagactacttcggtaaactcgaaagcaagttgagcgtcatcagaaacctcaatgatcaggtactattcatcgaccagggtaacaggccactattcgaggacatgacagattcagactgccgagacaacgccccccgaaccatttttattatttcgatgtataaagactctcaaccccgcggtatggccgtcacaatttcagtgaaatgcgagaagatttcaacgttgagctgcgagaacaaaatcatcagttttaaggaaatgaatccgcccgataatattaaggatacaaagtctgacataattttctttcaacgctctgtccctggccacgataataaaatgcaatttgaatcctcaagctatgaaggctattttctcgcctgcgaaaaggaacgcgacctgttcaagctcatacttaaaaaagaggatgagctcggtgaccgtagcattatgtttaccgtgcagaacgaggac

SEQ ID NO: 33270 - DNA, 579 bp, synthetic construct
  misc_feature 1..579: note = Description of Artificial Sequence: Synthetic coding sequence
  source 1..579: mol_type = other DNA
atggccgctgagccagttgaggataactgcattaattttgtggcaatgaagtttattgacaataccctttactttattgctgaagatgatgagaacttagaatctgactatttcggcaaattggagagtaaactttccgtgattcgcaacctcaatgaccaggttctgttcatagaccaggggaatcgccccctgttcgaagacatgaccgactctgattgcagggataatgctccacgcaccatatttatcatttctatgtacaaggattcccaaccccgtggtatggccgttacaatcagcgtaaagtgcgaaaagatctccacattaagctgtgaaaataagatcatttcttttaaagaaatgaacccccctgacaatattaaggatacaaagtctgatataattttttttcagcgctcagttccaggccacgataacaaaatgcaatttgagtccagcagctatgagggttacttcctggcttgtgaaaaagaacgggatctatttaagctgatcctaaagaaggaggacgagcttggggacaggtccattatgtttactgtacagaacgaggat

SEQ ID NO: 33271 - DNA, 579 bp, synthetic construct
  misc_feature 1..579: note = Description of Artificial Sequence: Synthetic coding sequence
  source 1..579: mol_type = other DNA
atggcagcagagcccgttgaggataactgcataaactttgtggcaatgaagttcattgacaacaccctgtacttcattgcagaggatgatgaaaacctggaaagcgattacttcggcaagctcgagtcaaaactttcggtgatcagaaatcttaatgatcaagtccttttcattgatcaaggcaatcgccctctttttgaagatatgacggactccgactgtagagacaatgcaccccggactatcttcattatctcgatgtacaaggatagccagccgcggggaatggcagtgaccatctccgtgaaatgtgagaaaatctccactctctcttgcgaaaacaagattatcagttttaaggagatgaaccctcctgacaacattaaggataccaaatccgatatcatcttttttcagcggagcgttccggggcatgacaacaagatgcaattcgaatcctcgagctacgaaggctacttcctggcctgcgaaaaagagagggatttgtttaaacttattctgaaaaaagaagatgaactgggtgatcgatcgataatgtttaccgtgcagaacgaagat

SEQ ID NO: 33272 - DNA, 579 bp, synthetic construct
  misc_feature 1..579: note = Description of Artificial Sequence: Synthetic coding sequence
  source 1..579: mol_type = other DNA
atggctgcagaacctgtcgaagacaactgtatcaattttgtggccatgaaatttattgataacaccctatactttatcgctgaggacgatgagaacctcgaatcagactattttggaaagctggagagcaagctcagcgtgatccgcaatctgaacgaccaggtgttatttatcgatcagggaaacaggccgctcttcgaggatatgaccgacagtgactgccgcgacaacgctcctaggacaatttttataatttccatgtacaaagacagccagccccgcggcatggccgtgaccatttctgtgaagtgtgagaaaattagcacactctcttgtgaaaataaaatcattagctttaaagaaatgaatccgcccgacaatattaaggacactaagagcgacatcattttttttcagcggtcagtcccgggccatgacaacaagatgcagttcgaatcctcaagctacgaggggtatttcctcgcatgcgagaaagaaagggacctctttaagcttatccttaaaaaggaggacgaactgggtgatagaagcatcatgtttacagttcagaatgaagac

SEQ ID NO: 33273 - DNA, 579 bp, synthetic construct
  misc_feature 1..579: note = Description of Artificial Sequence: Synthetic coding sequence
  source 1..579: mol_type = other DNA
atggccgccgaacctgtcgaagataattgtataaacttcgtggctatgaaatttatcgacaacacactgtatttcatagcggaggacgacgagaatttggagtcagattacttcggaaagctcgagagtaagctctcagtcatacgaaatctgaacgaccaggttcttttcattgatcaaggcaacagaccactgtttgaggacatgaccgattccgactgtagggataacgctcctagaaccattttcattatatccatgtacaaagactcacaaccccggggcatggcagtgaccatctcagtgaagtgcgagaagatcagcaccctgagctgtgagaacaaaattatcagcttcaaggaaatgaaccctccggacaacatcaaggacacaaaaagcgatatcatattctttcagaggtctgtgccaggacatgataacaaaatgcaattcgaaagctcttcctatgagggatatttcctcgcttgtgagaaagagcgcgatttgttcaagcttatcctcaaaaaggaggacgaactgggtgatcggagtataatgtttacagtacagaatgaagac

SEQ ID NO: 33274 - DNA, 579 bp, synthetic construct; identical to SEQ ID NO: 33240
  misc_feature 1..579: note = Description of Artificial Sequence: Synthetic coding sequence
  source 1..579: mol_type = other DNA

SEQ ID NO: 33275 - DNA, 579 bp, synthetic construct
  misc_feature 1..579: note = Description of Artificial Sequence: Synthetic coding sequence
  source 1..579: mol_type = other DNA
atggccgcagaacccgttgaagataactgtattaacttcgtggccatgaagtttatagataatactctctactttatcgcggaagatgacgagaacttggaatcggactactttgggaagctggagtcgaaactttccgtgatcaggaacctgaacgatcaagtgcttttcatcgatcaaggaaatagacctttgtttgaagatatgaccgacagcgactgtcgggataatgcaccccgcaccatcttcataatctccatgtacaaagactcccagcctagaggtatggcagtgaccatatctgtgaagtgcgagaagatttcgaccctctcgtgtgaaaacaaaatcatctcatttaaggagatgaatccacctgacaatatcaaagacacgaagtcggacataatcttcttccagcgttcggtcccgggacatgacaacaaaatgcaatttgagtcgagcagctatgagggctacttccttgcatgcgaaaaggaacgggatctgtttaagttgattcttaagaaggaggatgagctgggcgatcgttccattatgtttactgttcagaacgaagat

SEQ ID NO: 33276 - DNA, 579 bp, synthetic construct
  misc_feature 1..579: note = Description of Artificial Sequence: Synthetic coding sequence
  source 1..579: mol_type = other DNA
atggctgccgagcccgtggaggataattgcatcaatttcgtggctatgaaattcatcgataataccctttacttcattgctgaggacgatgagaacctcgaatcagattatttcggaaaactcgagtccaaactcagtgtgataagaaacctgaacgatcaagtcctgtttattgaccagggaaataggcccctttttgaagacatgacagatagcgattgtcgggataacgcaccccgaacaattttcattattagtatgtataaagattcccagcctaggggcatggccgtcaccattagcgtgaaatgtgagaaaatttccacactgtcatgcgagaataaaatcatctcattcaaagaaatgaaccccccagacaacataaaggatactaaatcagacatcatattttttcagaggagcgttcctgggcatgacaataaaatgcagtttgaatctagttcgtacgagggatatttcctggcctgtgagaaggaaagggacctgtttaaacttattttgaagaaggaagatgagttaggcgacagatccatcatgttcacagtgcagaatgaggac

SEQ ID NO: 33277 - DNA, 579 bp, synthetic construct
  misc_feature 1..579: note = Description of Artificial Sequence: Synthetic coding sequence
  source 1..579: mol_type = other DNA
atggccgcagaaccagttgaagataactgcataaacttcgtggctatgaaattcatcgataacactttatatttcatcgccgaggatgatgaaaatctagagtccgattattttggaaaacttgaatcaaagttgtcagtcatccgaaaccttaacgatcaagtcctttttatcgatcaaggaaacaggccattgttcgaagatatgacagattccgattgtcgtgataacgcaccccgtacaatttttataatctccatgtacaaggatagtcagccacgaggcatggcggttacaatttccgttaaatgcgaaaaaatcagtaccctgagttgtgagaataaaatcatttcctttaaagaaatgaatccacctgacaatattaaagatacaaaatccgatatcatcttttttcaaaggtcagttcctggacacgacaacaagatgcagtttgaatcgtcttcatacgaaggttatttcctggcatgcgagaaggagagggacttgtttaagttaattctgaaaaaagaggacgaacttggtgaccgttctatcatgttcacagttcagaatgaagac

SEQ ID NO: 33278 - DNA, 579 bp, synthetic construct
  misc_feature 1..579: note = Description of Artificial Sequence: Synthetic coding sequence
  source 1..579: mol_type = other DNA
atggcagctgagcctgtggaagataactgtataaactttgtagcaatgaaattcattgacaacactctttactttattgcggaagatgatgaaaacctggagagcgattactttgggaagctggaatcgaagctgagcgtgatccggaaccttaatgaccaagttctctttatcgatcaaggtaatagaccgctttttgaggacatgaccgactctgattgtcgggacaacgcgcctagaaccatcttcataatctccatgtacaaggatagccagccccggggcatggcagtgactatttcggtcaagtgtgaaaagatttcgacgctgtcctgcgagaataagatcattagctttaaggaaatgaatccaccagataacattaaagacactaagagcgatatcattttctttcaacgttccgtgcctggtcatgataacaagatgcagtttgaaagctcctcgtacgaaggttacttccttgcgtgcgagaaggagagagatttgtttaagctgatcttgaaaaaggaagatgagctcggggatcgctctatcatgtttaccgtgcagaatgaagat

SEQ ID NO: 33279 - DNA, 579 bp, synthetic construct
  misc_feature 1..579: note = Description of Artificial Sequence: Synthetic coding sequence
  source 1..579: mol_type = other DNA
atggccgccgaacctgtcgaggacaactgcattaattttgtcgcaatgaagtttatagataatacgctgtatttcattgctgaagacgatgaaaacctcgaaagcgactacttcggaaagctcgagtcaaaactctcagtgatcagaaatctcaacgaccaggtactgtttattgatcagggtaaccgacccctgttcgaggacatgacggattctgattgtcgggataacgccccccgaaccatctttatcattagcatgtataaagacagccagccaagagggatggcggtaacaataagtgtgaaatgcgagaaaatctcaaccttatcttgtgaaaataagatcatcagctttaaggaaatgaatccccctgacaacatcaaggataccaagtctgacataatcttttttcaacgaagcgtacccggtcatgataataaaatgcagtttgagtcaagctcctatgaaggttacttcctggcctgtgaaaaggagcgagacctgtttaagctcattctgaagaaggaggatgagctgggagaccgctctatcatgtttactgttcagaatgaagac

SEQ ID NO: 33280 - DNA, 579 bp, synthetic construct
  misc_feature 1..579: note = Description of Artificial Sequence: Synthetic coding sequence
  source 1..579: mol_type = other DNA
atggcagctgaacctgtggaagataactgtatcaactttgttgcaatgaagtttatagataatactctttactttatcgcagaggacgatgaaaacctggaaagcgactacttcggaaagctggaaagcaagctgagcgtgatacgaaaccttaatgatcaagtgcttttcatagatcaggggaaccggcctctttttgaggatatgactgactccgactgccgagacaacgcaccaagaaccatcttcataatctcaatgtacaaggatagtcagccgagggggatggcagtgaccatcagcgtgaaatgcgaaaagatttccactctgtcctgtgagaacaagataatctccttcaaagaaatgaatccacccgacaatatcaaggacactaaatcagacattatcttcttccagaggtcggtgcctggtcatgacaataagatgcaatttgaatcctcgtcgtatgagggctactttcttgcctgtgaaaaagaacgggacctgttcaagttgattctgaagaaggaggacgaacttggcgatcggtcaattatgtttaccgtccaaaatgaggat

SEQ ID NO: 33281 - DNA, 579 bp, synthetic construct
  misc_feature 1..579: note = Description of Artificial Sequence: Synthetic coding sequence
  source 1..579: mol_type = other DNA
atggccgcagaacctgtggaagataactgtattaacttcgttgcaatgaagttcattgataacactctctacttcatcgcggaagatgacgagaaccttgaatcagattacttcgggaagctggaatcaaagctgagcgtgattagaaacctcaacgatcaagtcctcttcatcgatcagggtaaccggcctctgtttgaggacatgacggattcggactgtagagacaatgccccaaggaccatcttcataatctccatgtacaaggattcccaaccaagaggcatggccgtcaccatttccgtcaagtgtgaaaagatatcgacgctgtcatgcgagaacaagatcataagtttcaaagagatgaatccacccgataacataaaggataccaagtccgacattatcttttttcagagatccgtgccaggtcatgacaataagatgcaatttgagagctcgtcgtacgaaggatacttcctggcatgtgaaaaggaaagggatctgtttaagctgattctcaaaaaagaagatgaattgggggatcgctccatcatgtttacggtgcaaaacgaagat

SEQ ID NO: 33282 - DNA, 579 bp, synthetic construct
  misc_feature 1..579: note = Description of Artificial Sequence: Synthetic coding sequence
  source 1..579: mol_type = other DNA
atggctgcagagccggtggaggacaactgcattaacttcgtcgccatgaagtttatcgacaacactctgtacttcatcgcggaggatgacgaaaatctcgaatctgattactttggaaagctggagtcgaaactctcagttattcggaacctcaatgaccaggttctgtttatcgaccaaggcaataggccgctgttcgaggacatgaccgatagcgattgtagagataacgctccgcgcactattttcatcatctcgatgtacaaggactcgcagccgcgggggatggcggtgactatctccgtgaagtgcgagaagatcagcactctgagctgcgaaaacaagatcatcagcttcaaggagatgaaccctcccgataacatcaaggataccaagtcggacatcattttcttccagcggtcagtgcctggacacgacaataagatgcagttcgaatcctcgagctacgaaggctacttcctggcatgtgaaaaggagagagacttgttcaagctgatcctgaagaaggaggacgaactcggagatcggtcaatcatgttcaccgtgcagaatgaggac

SEQ ID NO: 33283 - DNA, 579 bp, synthetic construct
  misc_feature 1..579: note = Description of Artificial Sequence: Synthetic coding sequence
  source 1..579: mol_type = other DNA
atggccgctgagcctgtcgaagacaactgcattaactttgtggcgatgaaatttatcgacaacaccctgtacttcatagcagaagacgacgagaatctagaatccgactatttcggcaagttggagagcaaattgagcgtcatccgtaacctgaacgaccaggtcctgtttatcgatcagggcaatcgcccgctgtttgaagatatgactgactctgattgtcgagataacgccccacgtacaatctttataatttctatgtataaggattcccagccccgtggcatggctgttacgatctcagtgaaatgtgaaaagatttccacgctgagctgcgagaataaaatcatcagttttaaagagatgaatcccccagataacatcaaggataccaagagtgacattattttcttccagcggtctgtaccaggccatgacaacaagatgcagttcgaatcctcaagttatgaagggtattttctcgcctgcgaaaaagagagagacctgttcaaactgatcctcaaaaaagaggatgagctgggggaccggtcaataatgttcacggtccagaacgaagat

SEQ ID NO: 33284 - DNA, 579 bp, synthetic construct
  misc_feature 1..579: note = Description of Artificial Sequence: Synthetic coding sequence
  source 1..579: mol_type = other DNA
atggcagccgaaccggtggaagataactgtatcaatttcgtcgcaatgaagtttattgacaacaccttgtactttatagcggaggatgacgaaaatcttgagtccgactacttcgggaagctcgaaagcaaattgtctgtgatcaggaacttgaacgatcaggtgctgttcatcgaccagggtaaccgcccgctctttgaggacatgaccgattcagactgccgagacaatgccccccggaccatcttcattatctcaatgtacaaagattcgcagcctagaggcatggcggtaaccatttcggtcaagtgcgaaaagattagcactctgagttgcgagaacaagatcatctcgttcaaggaaatgaacccaccggataacatcaaggacacgaagtcagacatcatcttcttccaacgctccgttcctggacacgataacaagatgcagtttgaatcttcctcgtacgaaggatatttcctggcttgcgagaaggagcgcgacctgttcaaactgatactcaaaaaagaggacgaactcggagatcgttccatcatgtttactgtgcaaaatgaggat

SEQ ID NO: 33285 - DNA, 579 bp, synthetic construct
  misc_feature 1..579: note = Description of Artificial Sequence: Synthetic coding sequence
  source 1..579: mol_type = other DNA
atggcagccgagccagttgaagataactgtatcaacttcgtggccatgaagtttattgataatactctgtacttcattgcggaggatgatgaaaacctcgaaagcgactatttcggcaagctggaatccaagctgtcggtgatccggaacctgaatgaccaggtcctgttcatcgaccagggaaaccggccactgttcgaggacatgaccgatagcgactgtagagacaacgctccgcggaccatctttatcatcagcatgtacaaagatagccagccgcggggtatggccgtcaccatcagcgtgaagtgcgaaaagatatccactctgtcgtgcgaaaacaaaatcatctcgttcaaggagatgaaccctccggacaacatcaaggacaccaaaagcgacatcatcttctttcaaaggtcggtgccgggacacgacaataagatgcagttcgaatcgtcatcatacgaaggttactttttggcgtgcgaaaaggagcgtgatctgttcaagctgatcctcaaaaaagaagatgaattgggagacagatcgatcatgttcaccgtgcagaatgaagat

SEQ ID NO: 33286 - DNA, 579 bp, synthetic construct
  misc_feature 1..579: note = Description of Artificial Sequence: Synthetic coding sequence
  source 1..579: mol_type = other DNA
atggccgccgaacctgtggaagacaactgtatcaattttgtggccatgaagttcattgacaacacactgtatttcatagcagaggacgacgagaatctagaatctgattacttcgggaaattggaatccaaactgtcagtgattcgcaacctcaacgaccaagtgttgtttatcgatcaggggaatcggccgcttttcgaagacatgactgactcagactgccgggataacgccccaaggacaatttttatcatctctatgtacaaggactctcagccacgggggatggccgtcacaatatctgtgaagtgcgagaaaattagcacactaagttgcgaaaacaaaattatcagcttcaaggaaatgaatccccctgacaatattaaggatacaaaatcagatatcatattctttcagaggtccgttccagggcacgacaacaagatgcaattcgaatcttcatcctatgagggctacttcctcgcctgtgagaaggagagagacttgttcaagctgattctgaaaaaagaggatgaactgggcgacagatcaataatgtttaccgttcagaatgaggac

SEQ ID NO: 33287 - DNA, 579 bp, synthetic construct
  misc_feature 1..579: note = Description of Artificial Sequence: Synthetic coding sequence
  source 1..579: mol_type = other DNA
atggccgccgaacctgtagaagacaattgtattaatttcgtggccatgaaattcatcgataatacactgtatttcatcgcggaggatgacgagaatctggaatccgactacttcggaaagctcgaaagcaagctttctgtgattagaaacttgaatgaccaagtgctcttcattgaccagggtaatcggcctctctttgaagacatgacagactccgattgtcgggataatgcaccaaggacaattttcatcatctccatgtacaaagacagccagcctcgcgggatggctgtgaccatctccgtcaagtgcgagaaaatctccactctttcttgtgagaacaagatcatctccttcaaagagatgaatccccctgacaatattaaggacaccaagagtgatatcatatttttccagcgcagtgtgccggggcatgataacaaaatgcagttcgagtcgagctcttacgagggatatttcctcgcatgtgaaaaagaacgtgatctgtttaaactgatcctaaagaaagaggacgaactcggggacagaagtataatgtttaccgtacaaaatgaagat

SEQ ID NO: 33288 - DNA, 579 bp, synthetic construct
  misc_feature 1..579: note = Description of Artificial Sequence: Synthetic coding sequence
  source 1..579: mol_type = other DNA
atggccgcagagcccgttgaggataactgcatcaattttgtagccatgaagttcattgataatacgctctactttatcgctgaggatgatgagaatctcgagtccgactacttcggtaagctggagagcaaattgtcagtgatccgcaatctgaatgaccaggtgctgttcatcgaccagggaaataggccgttgttcgaggacatgactgatagcgactgcagagacaacgccccgagaaccatctttataattagcatgtacaaggattcacaaccgagaggtatggctgttacgatcagcgtgaagtgcgagaagataagtacgctgagctgcgagaataagattatcagctttaaggaaatgaacccccctgacaacataaaagacacaaagtccgacatcatcttcttccagagatccgttcccggccatgataacaagatgcagttcgaatccagctcttatgagggttattttctcgcttgcgagaaggagagggacctgttcaagctgatcttgaagaaagaagatgagctgggagataggagcatcatgttcacggttcagaatgaagat

SEQ ID NO: 33289 - DNA, 579 bp, synthetic construct
  misc_feature 1..579: note = Description of Artificial Sequence: Synthetic coding sequence
  source 1..579: mol_type = other DNA
atggccgccgaacccgttgaagacaactgtattaattttgtcgccatgaagtttatagataacaccttgtacttcatagccgaagacgacgaaaaccttgaatctgactacttcggtaaactggagtccaagctgtcagtgatcaggaaccttaacgatcaggttctctttatagatcaggggaacagacctttatttgaagatatgaccgattctgactgcagggacaacgcccccaggaccatatttatcatatcaatgtacaaggactctcagccaagagggatggcagtcactatttctgtaaagtgcgagaagataagtaccctcagttgcgagaacaaaatcattagcttcaaggagatgaatccaccagataacatcaaggacacgaagtcagacataattttctttcagcggtctgtgcccggccacgacaacaagatgcagtttgaaagcagtagctacgaggggtacttcctcgcatgcgaaaaggagagggatttgttcaagctcattctgaaaaaggaggacgagctcggagacagaagtataatgttcactgtccagaatgaagat

SEQ ID NO: 33290 - DNA, 579 bp, synthetic construct
  misc_feature 1..579: note = Description of Artificial Sequence: Synthetic coding sequence
  source 1..579: mol_type = other DNA
atggctgccgagcctgtcgaagataactgcatcaactttgtagccatgaaattcatcgataataccctttattttatcgctgaggacgacgaaaatctagagagcgactactttggcaaactcgaatcaaaactatcagtgattcgaaacctgaatgatcaagtgctcttcatcgatcaaggaaaccgacccctgttcgaagatatgacagattctgattgccgagataacgcccccaggactatattcattatcagcatgtacaaagactctcagccccggggaatggccgtcacaatctcggtgaagtgcgagaaaatctcaaccctgtcgtgcgagaacaagatcatctcattcaaggagatgaatcccccagataatattaaagacactaagagtgacattattttttttcagaggtctgtgccaggccacgacaacaagatgcagttcgagtcatcatcttatgaaggttactttctcgcctgtgaaaaggagcgggatctgtttaagctgatcctgaaaaaggaggatgaactgggggacagaagcataatgtttacggtgcaaaatgaagat

SEQ ID NO: 33291 - DNA, 579 bp, synthetic construct
  misc_feature 1..579: note = Description of Artificial Sequence: Synthetic coding sequence
  source 1..579: mol_type = other DNA
atggcggccgagccagtcgaagataattgcatcaactttgtggcgatgaagttcatcgacaacactctttactttatcgccgaggatgacgagaacctggaatccgactacttcgggaaactggagagcaagctgtcggtcatcagaaatttgaacgaccaggtgctctttatcgaccagggaaaccgcccgctgtttgaggacatgaccgactcagactgccgggacaatgccccacgcactattttcatcatcagcatgtacaaagatagccagccacgcggaatggctgtgaccatcagcgtgaagtgcgaaaagatttccactctgtcatgtgagaacaagattatctcgttcaaagaaatgaatccgccagacaacattaaagataccaaatcagacataatcttctttcaacgctcggtccctggccacgataacaagatgcaattcgagtcatcctcgtatgaaggatacttccttgcatgcgaaaaagagcgggatctcttcaagctcatcttgaagaaggaggacgagctgggtgaccgcagcattatgttcacggtgcagaacgaggat

SEQ ID NO: 33292 - DNA, 579 bp, synthetic construct
  misc_feature 1..579: note = Description of Artificial Sequence: Synthetic coding sequence
  source 1..579: mol_type = other DNA
atggcagctgaacctgtggaagataattgtatcaatttcgtggcgatgaagtttatagacaacaccttgtactttatcgccgaggacgatgaaaacctggaatcagattactttggtaaacttgaatcgaagctgagcgtgattagaaacctgaacgatcaagtcctcttcatcgatcagggcaacagacctctttttgaagatatgacggattcagactgtcgggataatgcacctaggacgatctttatcatatcgatgtataaagacagccaaccaagagggatggcagtgactatttccgtgaaatgtgagaagatttcaacgctgtcctgtgagaataagattatcagctttaaggagatgaacccacctgacaacattaaggataccaaatcggatatcattttctttcagcggagcgtgcctgggcatgacaataagatgcagtttgaatcgtcatcatacgaggggtacttccttgcatgcgaaaaggagcgagatctgtttaagttgatactcaaaaaggaggacgaacttggcgatcgctccattatgttcactgttcagaacgaggat

SEQ ID NO: 33293 - DNA, 579 bp, synthetic construct
  misc_feature 1..579: note = Description of Artificial Sequence: Synthetic coding sequence
  source 1..579: mol_type = other DNA
atggcagcagagcccgtggaggacaactgcattaatttcgtcgcgatgaagttcatagacaataccctatacttcatcgccgaggacgatgaaaacctcgagtccgattattttgggaagcttgagagtaagttgtctgtcatccggaatctcaacgaccaggttttattcattgatcagggcaatcgccccttgttcgaggacatgacagattccgactgccgtgataatgcccctcgaacaatatttatcatttctatgtacaaagattcacagccaaggggcatggccgtgaccatctctgttaaatgtgagaagatctcaacactgtcctgcgagaacaaaatcatcagtttcaaggagatgaacccaccagacaacatcaaggacacaaagagcgatattatttttttccagagatcagtgcctggccacgacaacaaaatgcagttcgagtctagctcgtacgaagggtacttcctggcctgcgaaaaggagcgagacctcttcaagctgatccttaagaaggaggacgagctcggagataggtctattatgttcacagtgcagaatgaagac

SEQ ID NO: 33294 - DNA, 579 bp, synthetic construct
  misc_feature 1..579: note = Description of Artificial Sequence: Synthetic coding sequence
  source 1..579: mol_type = other DNA
atggccgccgagccggtcgaagataattgcatcaattttgtggcaatgaagtttatcgacaacaccctctactttatcgcggaggacgacgaaaaccttgagagcgactacttcggcaaactggaatcaaagctgagcgtaatcaggaacctgaatgaccaggtgctgttcattgaccaagggaatcggccgctgttcgaggatatgaccgattcagactgccgggacaatgccccgcggactatcttcatcatcagtatgtacaaggactcgcagccacgcggtatggcagtgaccatttccgtgaaatgcgagaaaatctccacgctgtcgtgtgaaaacaagatcatcagcttcaaggagatgaacccgccagacaacatcaaagatactaaatctgacataatcttcttccaacgctcggtgccgggccacgacaataagatgcagttcgagagctcctcgtatgaaggctacttcctggcttgtgagaaggagcgtgacctcttcaaactgatcctgaagaaggaagatgagctcggagatagatccattatgtttactgtgcagaacgaggac

SEQ ID NO: 33295 - DNA, 579 bp, synthetic construct
  misc_feature 1..579: note = Description of Artificial Sequence: Synthetic coding sequence
  source 1..579: mol_type = other DNA
atggcagcagaaccagttgaagataactgcatcaatttcgtggccatgaagtttatcgacaatacgttgtactttatcgctgaggacgacgagaatctggaaagcgattattttggaaagctagagagcaagctgtccgtcatccggaaccttaatgatcaggtgctgttcatcgatcagggcaaccggccactctttgaggacatgactgatagcgattgtagagataacgctcctcgaactatcttcatcatttctatgtataaagactcacagccaaggggaatggctgtgaccatcagcgtgaagtgcgagaagatttccaccctgtcttgcgagaacaaaattatcagcttcaaggaaatgaaccccccagacaatattaaggacaccaagtcagatatcatcttcttccagaggagcgtcccaggacacgacaataaaatgcagtttgagagcagtagttacgaaggatatttcttggcctgcgaaaaggaaagggatctgtttaaactgatactcaagaaagaagatgagctgggcgataggagtatcatgttcaccgtacagaacgaggac

SEQ ID NO: 33296 - DNA, 579 bp, synthetic construct
  misc_feature 1..579: note = Description of Artificial Sequence: Synthetic coding sequence
  source 1..579: mol_type = other DNA
atggccgcagagcctgttgaggacaactgtattaatttcgtggcaatgaaatttatcgataacaccctgtactttatcgctgaggatgatgagaacttggagagcgactatttcggcaagctggagtccaagttgagcgttattaggaacctgaatgatcaggtcctgtttatcgatcaggggaacaggccactgtttgaggatatgaccgattccgattgtagagacaacgccccccggacaatctttattatctcaatgtacaaagatagtcagcccaggggtatggctgtcactatctcagtaaaatgtgagaagattagtaccctgtcctgcgaaaacaagatcatatcctttaaggagatgaacccaccagataacatcaaggacactaagagcgacataattttctttcaaagatctgttcccggtcacgataataagatgcaattcgaaagtagctcttacgaggggtatttcttggcctgcgagaaggaaagggatctgtttaaactgatactgaagaaagaggatgagcttggcgacagatctatcatgttcactgtgcagaacgaggac

SEQ ID NO: 33297 - DNA, 579 bp, synthetic construct
  misc_feature 1..579: note = Description of Artificial Sequence: Synthetic coding sequence
  source 1..579: mol_type = other DNA
atggcagcggaaccagtggaggataattgtatcaactttgtcgccatgaagtttatagataacactctgtacttcattgcagaggatgatgagaacctggagtcggactattttggaaagttggagagcaagctctcggtaatacggaatctcaacgatcaggtgttgttcatagaccaaggtaaccgcccactgtttgaggacatgaccgattccgactgtagagataacgcaccccgtactatcttcatcatcagcatgtacaaagactcgcagcctagaggaatggccgtgaccatttcagtgaagtgcgaaaagattagtacgctgtcgtgtgagaacaagattatctcatttaaggaaatgaatccccctgacaatatcaaagataccaagtctgacatcatcttctttcagagatcggtgcccggtcatgacaacaaaatgcaattcgaatcgtcctcctacgaaggctactttctggcatgcgaaaaagaacgggatctgtttaagctcatattgaaaaaggaagatgaacttggggaccgatcaattatgttcaccgtgcaaaatgaggac

SEQ ID NO: 33298 - DNA, 579 bp, synthetic construct
  misc_feature 1..579: note = Description of Artificial Sequence: Synthetic coding sequence
  source 1..579: mol_type = other DNA
atggccgctgagcctgtggaagataactgtatcaactttgtggccatgaaattcattgataacacgctttactttatagcagaggacgatgagaatcttgaatcagattacttcggcaaactcgagtcgaaactttcagtcataagaaacctgaacgatcaagtgctgttcatcgaccagggtaacagacctctctttgaggacatgactgattcggactgccgcgataatgctccacgtacgatctttatcatttctatgtacaaggatagccaacccagaggtatggcggtcactattagcgtcaagtgtgagaaaatctcaaccctgtcctgtgagaataagatcatttcctttaaggagatgaatccgcccgataacattaaagatactaagtcagatatcattttctttcagcggagcgtcccagggcatgacaataagatgcaattcgaatcgagtagctacgaagggtatttccttgcatgtgaaaaggaacgagatctctttaaacttattctgaaaaaggaagatgaactgggagatcgttcgattatgttcactgtgcagaacgaggat

SEQ ID NO: 33299 - DNA, 579 bp, synthetic construct
  misc_feature 1..579: note = Description of Artificial Sequence: Synthetic coding sequence
  source 1..579: mol_type = other DNA
atggccgcagagccggtcgaagacaattgcatcaactttgtcgcaatgaagttcattgataataccttatacttcatcgccgaggatgatgagaatctggagagcgattattttggtaaactcgagagcaaactatctgtcatccgcaacctaaacgaccaggtgctgtttattgaccagggcaatagacctttgtttgaggacatgacggattcagattgcagagataacgctccaagaacgatctttatcatctctatgtataaggatagtcagccccgcggtatggctgtaaccattagtgtgaagtgcgaaaaaatttcgacattatcttgcgagaataagatcatctcctttaaggagatgaacccacccgacaatattaaagatacaaaatctgacatcatcttttttcaaaggtctgtgccgggacacgataacaagatgcagtttgagtcttcctcttatgaaggttactttctggcatgtgaaaaggagcgggatctgttcaaactcatcctgaagaaggaggatgaattgggagatagatcaatcatgttcacagttcagaacgaggac

SEQ ID NO: 33300 - DNA, 579 bp, synthetic construct
  misc_feature 1..579: note = Description of Artificial Sequence: Synthetic coding sequence
  source 1..579: mol_type = other DNA
atggccgctgagccagttgaagataactgcatcaacttcgtggcaatgaaatttatcgacaacaccctgtacttcatcgctgaggacgatgaaaatctggagagcgattactttgggaagttagaatccaaactctcagtcattagaaatttgaacgaccaagttctgttcatcgatcagggaaaccgccccctctttgaagatatgacagattcagattgccgtgataacgcccccagaactatcttcatcatatcaatgtataaggactcccagcctcgcggcatggccgttacaatatcagtgaagtgcgaaaaaataagcactctctcctgtgaaaataaaattatatcatttaaagagatgaacccaccggataatatcaaggatacaaagtcagacatcatctttttccagaggtccgttccaggacacgacaacaaaatgcagtttgagtccagctcctatgaggggtacttcctggcatgcgaaaaggagcgcgacttatttaagctgattctcaagaaagaagatgaactgggtgatcgcagcatcatgtttaccgtccaaaacgaagac

SEQ ID NO: 33301 - DNA, 579 bp, synthetic construct
  misc_feature 1..579: note = Description of Artificial Sequence: Synthetic coding sequence
  source 1..579: mol_type = other DNA
atggctgcggagccagtggaagacaattgcattaacttcgtcgctatgaagttcatagataacactttatacttcatcgctgaagatgatgaaaatctcgaatcggattacttcggtaaattggagtccaaattatctgttatccgcaacttgaatgatcaagtactgtttattgatcaagggaaccgaccacttttcgaggatatgacggacagtgattgccgtgataatgccccacgaacaattttcatcatttcaatgtacaaagattcacagccaagaggcatggcagtcacaatttcagtcaaatgtgaaaaaatatcaacgttatcgtgtgagaacaagattatttcgttcaaagagatgaatccaccagataatattaaagatacaaaaagtgatattatctttttccaaagatccgtacctggacacgacaacaaaatgcagtttgaatcatcatcctatgaggggtacttccttgcttgcgaaaaggaaagagatctgttcaagctcatactcaagaaggaagacgagcttggagatcgttcaatcatgtttacagtccaaaatgaagat

SEQ ID NO: 33302 - DNA, 579 bp, synthetic construct
  misc_feature 1..579: note = Description of Artificial Sequence: Synthetic coding sequence
  source 1..579: mol_type = other DNA
atggccgctgagcctgtagaagacaactgcatcaacttcgtggctatgaagttcattgacaatacactgtacttcatcgccgaggacgacgaaaatctagagagcgattatttcgggaaattggaaagtaagctctcagtcatcaggaatctgaacgaccaggttctcttcatcgatcagggtaatagaccactatttgaagatatgacagactcggattgtagggataacgcgccacgcacaatattcatcattagcatgtacaaagattcacagccaagaggcatggctgtaactattagcgtgaagtgtgaaaagatctccacattgtcctgtgaaaacaaaatcatctcctttaaggagatgaacccccccgataatataaaagacacaaagagcgatatcattttttttcagcggagtgtccccgggcacgacaacaagatgcagtttgagtcgtcttcttacgaagggtattttcttgcttgtgaaaaggagagggacctattcaagttgatccttaagaaggaggacgagttaggcgaccgctcaataatgtttacagtccaaaatgaggat

SEQ ID NO: 33303 - DNA, 579 bp, synthetic construct
  misc_feature 1..579: note = Description of Artificial Sequence: Synthetic coding sequence
  source 1..579: mol_type = other DNA
atggccgccgagccggtggaggacaactgcatcaacttcgtggctatgaaattcatcgataacaccctgtacttcatcgcagaagatgacgagaacctggaatccgactacttcggcaagctggaatcaaagctgtccgtgatccgcaatttgaatgaccaggtgctgtttatcgaccaaggtaatcgccctctctttgaggatatgaccgattcggactgcagagacaatgcccctcgcaccattttcatcatttccatgtacaaggactcgcagccgagaggcatggccgtgaccatctccgtgaagtgcgaaaagatctcgaccctgtcttgtgaaaacaagattatctctttcaaagaaatgaatcccccggataacatcaaggatactaaatcggacatcattttcttccagcgctcagtgccaggccatgacaacaaaatgcagttcgagagcagctcctacgagggatacttcctggcttgcgagaaggaacgcgatctgttcaaactgatcctcaagaaagaggatgaactgggagatcggtccattatgttcacggtccagaacgaagat

SEQ ID NO: 33304 - DNA, 579 bp, synthetic construct
  misc_feature 1..579: note = Description of Artificial Sequence: Synthetic coding sequence
  source 1..579: mol_type = other DNA
atggccgccgagccagtggaggataactgcattaacttcgtggccatgaaatttattgacaataccctgtactttattgcagaggatgatgagaacctggagagcgattattttggaaagctagaatccaagctgtcagtgatccgaaacctcaacgaccaggtgctgttcatcgaccaagggaaccggccgttgtttgaggacatgacagatagtgactgtagggacaatgcacccaggactattttcattattagcatgtataaagattctcagcctcggggcatggccgtgacaatctccgtcaagtgtgagaagatttctaccctgagttgtgagaacaaaataatcagttttaaggagatgaaccctccagacaacattaaagacaccaaatctgatatcatctttttccaacgctctgtcccaggtcacgataataaaatgcagtttgagtcatcaagctacgaaggatactttctggcttgtgagaaggaacgggatctgtttaaactcatcctaaagaaagaggatgaactaggtgatcgcagcattatgtttacagttcaaaacgaggat

SEQ ID NO: 33305 - DNA, 579 bp, synthetic construct
  misc_feature 1..579: note = Description of Artificial Sequence: Synthetic coding sequence
  source 1..579: mol_type = other DNA
atggctgcagagcctgtggaggataattgcattaatttcgttgcaatgaaattcattgacaataccctgtacttcatcgcagaagacgatgaaaacttggaatcggattactttggaaagttagagtcaaaattgtccgtgatccgaaacctgaacgatcaggtcttatttattgatcaagggaaccggcctctgttcgaggacatgaccgacagcgactgtcgcgacaacgctccgaggacaatctttataatctcaatgtataaggacagtcagccgcggggaatggcagtcaccatttccgtgaaatgcgagaagatttcgactctatcatgcgagaacaagataataagcttcaaggagatgaatcccccagataatataaaggacactaaatctgacatcattttttttcagaggtccgttccgggacacgacaacaaaatgcaatttgaatcaagctcctatgaaggctacttcctggcatgcgagaaggagagagatctgttcaagttgattctcaagaaggaagacgagttgggagatcgttccataatgttcaccgtgcagaacgaagat

SEQ ID NO: 33306 - DNA, 579 bp, synthetic construct
  misc_feature 1..579: note = Description of Artificial Sequence: Synthetic coding sequence
  source 1..579: mol_type = other DNA
atggccgccgagccagtggaagataactgcattaactttgtagcaatgaagtttattgacaacacgctgtacttcattgcggaggacgatgaaaacctggaaagcgattactttggcaagttggagtccaagctgtcagtgatcaggaatctcaacgatcaagtacttttcatcgaccaaggaaacagaccactgttcgaggatatgaccgattccgactgtcgggacaacgcccctaggacaatcttcataatttccatgtataaggactctcagccccgggggatggccgtcaccatctctgtgaagtgtgagaaaatttccacgctctcttgtgaaaataaaataatctcgttcaaggagatgaacccacccgacaacatcaaagacactaagagcgatattattttttttcaacgaagcgtgccaggccacgataataaaatgcagtttgaatcaagctcctatgaagggtactttttagcttgtgaaaaagaacgggacctgttcaagctcatcttgaagaaggaggacgaactgggggatagaagtattatgtttactgtgcagaatgaggac

SEQ ID NO: 33307 - DNA, 579 bp, synthetic construct
  misc_feature 1..579: note = Description of Artificial Sequence: Synthetic coding sequence
  source 1..579: mol_type = other DNA
atggccgccgagccagtggaggacaactgcattaacttcgtggcgatgaaattcatcgacaacactctttacttcatcgccgaggacgatgaaaatctggaaagcgactacttcggcaaacttgaaagcaagctgtccgtcattcggaatctgaatgaccaggtgctgttcatagatcaaggaaatagaccgttgttcgaagatatgaccgactcggattgccgcgataacgctcctcgtaccatctttatcatctctatgtacaaggactcccagccccgaggcatggctgtgactatctcggtcaagtgcgaaaagatcagcaccctctcatgcgaaaacaagattatcagctttaaggagatgaatccgccagataacatcaaagacactaaatctgatatcattttcttccaacgctcggtgccgggacacgacaataagatgcagttcgagtcctcgtcatacgagggttatttcctggcttgtgaaaaggagcgggacttgtttaaactgatcctcaagaaagaggatgaattgggagacaggtcgatcatgtttaccgtgcagaacgaggac

SEQ ID NO: 33308 - DNA, 579 bp, synthetic construct
  misc_feature 1..579: note = Description of Artificial Sequence: Synthetic coding sequence
  source 1..579: mol_type = other DNA
atggcagcagaacctgttgaagataactgtataaacttcgttgcaatgaagtttatcgacaataccctctactttatagcggaagatgacgaaaatctcgaaagcgattactttggtaagctggagtctaaactgagcgtcatcagaaatttgaatgatcaagtgcttttcatagaccaaggtaatcggccccttttcgaggacatgacggattcggattgtcgagataacgcccctcgaaccattttcatcatttcgatgtacaaggattcccagcctaggggtatggctgtcactatcagcgtgaaatgcgagaagatttccaccttgtcgtgcgaaaacaagatcatatcgttcaaggagatgaacccaccagacaacattaaggacaccaagtcggacattatcttttttcagagaagcgtcccaggtcatgataacaaaatgcagttcgaatcatcgtcatacgagggatatttcctcgcctgtgagaaggaaagagatctgttcaaacttatactgaagaaggaagatgaacttggagatcgatccatcatgtttactgtccaaaacgaagat

SEQ ID NO: 33309 - DNA, 579 bp, synthetic construct
  misc_feature 1..579: note = Description of Artificial Sequence: Synthetic coding sequence
  source 1..579: mol_type = other DNA
atggcggctgaacccgttgaggacaactgcatcaactttgtcgctatgaagttcatcgataacactctgtacttcatagcagaggacgatgagaatttggagtcggattacttcggcaaactagaatcgaagctatccgttatccgaaacctcaacgatcaggtgctgttcatcgaccagggcaacaggccactgttcgaggatatgacagacagcgactgccgcgacaacgcaccgcgtaccatcttcatcatctccatgtacaaggactctcagcctcgcggtatggcagttactatcagcgtgaagtgtgaaaaaatctctacgctttcttgcgagaacaagattatatccttcaaagagatgaacccgcccgacaacatcaaggatacaaagtccgatattatcttcttccagcgctcggtgcccggccatgataacaagatgcagttcgaatccagcagctatgagggctactttcttgcatgcgagaaggagcgagacctgttcaagctcatccttaagaaggaggatgagctcggtgaccgctcgatcatgttcaccgtccagaacgaagat

SEQ ID NO: 33310 - DNA, 579 bp, synthetic construct
  misc_feature 1..579: note = Description of Artificial Sequence: Synthetic coding sequence
  source 1..579: mol_type = other DNA
atggcggccgagccggtggaggacaattgcatcaatttcgtggctatgaagttcatcgacaatactctgtactttatcgccgaagatgatgaaaacctggagtcagactatttcggaaagctggagagcaagttgagtgtgatccgcaatctcaacgaccaagtgctgtttatcgaccagggaaaccgcccgctgttcgaggacatgaccgattcagattgtagagataatgccccgcggacgatctttatcatttcaatgtacaaagactcgcaaccaagaggaatggctgtcaccatcagcgtgaagtgtgagaagatctccaccctgtcctgtgaaaacaagatcatttcattcaaggagatgaacccgccagacaacattaaagacactaagtccgacatcattttcttccagcgcagcgtgccggggcacgataacaagatgcagttcgaatcttcgtcctacgagggatacttcctcgcgtgcgagaaggagagggatcttttcaagctcatactgaagaaggaagatgaactcggcgaccggtcgattatgtttaccgtgcaaaatgaggac

SEQ ID NO: 33311 - DNA, 459 bp, synthetic construct
  misc_feature 1..459: note = Description of Artificial Sequence: Synthetic coding sequence
  source 1..459: mol_type = other DNA
atgtatcggatgcagctgctctcatgcatagcactcagcctcgcgttggtgaccaatagtgcgcccacgtcttcaagcactaagaagacgcaactgcagcttgagcatctccttctcgatctgcaaatgatcttaaacggcattaacaactacaagaatccaaagttaacaaggatgcttacctttaaattctatatgcccaagaaagctacagagctaaaacacctgcaatgtctcgaagaagaactgaagcctcttgaggaagttctcaacctcgcccaatccaagaactttcatctccgtcctcgtgatttgatctcaaatattaacgtgatagttttggagctcaaggggagcgaaactacgttcatgtgcgaatatgcggacgaaaccgccacaatcgtagaattcctcaacagatggatcacattttgtcagagcattatctcaaccttaact

SEQ ID NO: 33312 - DNA, 459 bp, synthetic construct
  misc_feature 1..459: note = Description of Artificial Sequence: Synthetic coding sequence
  source 1..459: mol_type = other DNA
atgtatcgaatgcaactattatcgtgtatagcgctatcgctagcgctagttacgaattcggcgccgacgtcgtcgtcgacgaaaaaaacgcaactacaattagaacatctattactagatctacaaatgatactaaatggtataaataattataaaaatccgaaattaacgcgaatgttaacgtttaaattttatatgccgaaaaaagcgacggaactaaaacatttacaatgtttagaagaagaattaaaaccgttagaagaagtactaaatctagcgcaatcgaaaaattttcatctacgaccgcgagatctaatatcgaatataaatgttatagtattagaattaaaaggttcggaaacgacgtttatgtgtgaatatgcggatgaaacggcgacgatagtagaatttttaaatcgatggataacgttttgtcaatcgataatatcgacgttaacg

SEQ ID NO: 33313 - DNA, 459 bp, synthetic construct
  misc_feature 1..459: note = Description of Artificial Sequence: Synthetic coding sequence
  source 1..459: mol_type = other DNA
atgtaccggatgcagcttctttcctgtattgcactttctctggcgcttgtgactaactccgcaccaacgagctcgagcactaaaaagacgcagttgcaattggaacacttgctgcttgatcttcaaatgattcttaatggaatcaacaactacaagaatcctaagttgacccggatgttgacctttaagttttacatgccgaagaaggcaaccgaactcaagcatcttcaatgtcttgaagaagagctgaaaccactggaagaagtgctgaacctggcacagtcgaagaactttcaccttaggccaagagatctgatctccaacattaacgtgattgtgctggagctgaaagggtcagaaaccacttttatgtgcgaatacgccgacgaaactgccaccattgtggaatttcttaatcggtggattactttctgtcaatcgatcatttccaccctgacc

SEQ ID NO: 33314 - DNA, 459 bp, synthetic construct
  misc_feature 1..459: note = Description of Artificial Sequence: Synthetic coding sequence
  source 1..459: mol_type = other DNA
atgtaccggatgcagctgctcagctgtattgccctctcgcttgccctcgtgactaactcagcacctacctcctcatcgactaagaaaactcagcttcagcttgagcacctgcttctcgatctgcaaatgattctgaatggtattaacaactacaagaatccaaagctgacccgcatgctgacctttaagttctacatgccaaaaaaggcgactgaactcaagcacttgcaatgtctcgaagaagagctcaagccgctggaagaagtgcttaatcttgcacagtcgaagaacttccatctgcgtcctagagatcttatctcaaacatcaatgttatagtgcttgaacttaagggttcggaaactacgtttatgtgcgagtacgccgatgaaaccgcaactattgtggagtttctgaacagatggattaccttttgccaatcaatcatttcaactttgacc

SEQ ID NO: 33315 - DNA, 459 bp, synthetic construct
  misc_feature 1..459: note = Description of Artificial Sequence: Synthetic coding sequence
  source 1..459: mol_type = other DNA
atgtacagaatgcagctccttagttgtattgctctttcactggcactggtgactaattctgcccctacctccagctctaccaaaaagactcagctgcagctggagcacctcctgcttgatcttcagatgatcctgaatgggattaataactacaagaacccaaagttgacaaggatgctgaccttcaagttctacatgcctaagaaagctacagagcttaagcacttgcagtgcctggaggaggagctgaagcctctggaagaagtgctcaatttggcccaatctaagaactttcacctgagaccccgcgatctaatctcgaacattaacgtgattgtgttggaactcaagggcagcgaaacaacttttatgtgtgagtatgctgacgagaccgctactatcgtcgaattcctgaaccggtggattactttttgccaaagtatcatttccaccttgacc

SEQ ID NO: 33316 - DNA, 459 bp, synthetic construct
  misc_feature 1..459: note = Description of Artificial Sequence: Synthetic coding sequence
  source 1..459: mol_type = other DNA
atgtaccgaatgcaactgctgtcgtgcatcgccctttctctcgccctggtgaccaactcagcgcctacttcgtcctcaaccaagaagactcagctgcaactggaacatttgctcctcgacctccaaatgatcttgaatggtatcaataactataagaacccaaagctcacccggatgctcacttttaagttttacatgccgaagaaagccactgagcttaaacatctgcaatgccttgaagaagagttgaagccgttggaggaagtgttgaatctggcacagagcaagaacttccatcttaggcctcgggatctgataagcaacatcaacgtgatcgtcctggagctgaagggaagcgaaacgaccttcatgtgtgagtatgccgacgagacggctactatcgtggaattcctgaaccgctggatcaccttctgccagtcgatcatttcgactctgacg

SEQ ID NO: 33317 - DNA, 459 bp, synthetic construct
  misc_feature 1..459: note = Description of Artificial Sequence: Synthetic coding sequence
  source 1..459: mol_type = other DNA
atgtaccggatgcaattgctttcttgcatcgctctcagcctcgcgctggtcactaactccgctcccacctcttccagtacgaaaaagacacagttgcagctggagcacctcctccttgatctccaaatgatcctgaatggtattaataactataaaaaccctaaactgacgagaatgttaacctttaagttttatatgcccaagaaggcaactgaactcaagcatcttcagtgtctggaggaagagctcaagcctctcgaagaggtcttaaatcttgcccaatctaagaactttcatctcagaccgagagacctgatttctaatatcaatgttatagtgttagagctcaagggcagtgagaccacattcatgtgcgaatatgctgacgagacggccaccatcgtcgagttcctgaacaggtggattactttttgtcaatcaattataagcaccctgacc

SEQ ID NO: 33318 - DNA, 459 bp, synthetic construct
  misc_feature 1..459: note = Description of Artificial Sequence: Synthetic coding sequence
  source 1..459: mol_type = other DNA
atgtacagaatgcagctgctgtcgtgcatcgctctctcgctggccctggtgactaactccgcgcctacctcgtctagcaccaagaaaactcaactccagctggaacatttgctgctggatctccagatgatcctcaacggaattaacaactacaagaacccaaagctgaccaggatgctgactttcaagttctatatgccgaagaaagcgaccgaacttaaacatcttcaatgcctcgaagaggaactgaaaccactggaagaagtgctgaatttggcgcagtcgaagaacttccatttgcgcccgagagatctcatctcaaatatcaacgtgatcgtcctggagctgaaaggctccgaaaccactttcatgtgcgaatacgcagacgagactgctaccatcgtcgagtttctgaaccggtggattactttctgccagtcgatcatctcaacgctgacc

SEQ ID NO: 33319 - DNA, 459 bp, synthetic construct
  misc_feature 1..459: note = Description of Artificial Sequence: Synthetic coding sequence
  source 1..459: mol_type = other DNA
atgtacagaatgcagttgctttcctgcattgctctcagcctcgccctagtcaccaactctgcaccgacctccagttctaccaagaagactcagctccagctggagcatcttttgctcgatcttcagatgattctaaacggtatcaataactataaaaaccccaagctaacccgtatgctcaccttcaaattttatatgcccaagaaggctaccgagctaaagcaccttcagtgcctggaggaggagcttaagcctctcgaggaagtgctaaaccttgctcagtcaaagaacttccatctcaggccaagggatctaatcagcaacatcaacgtcatcgtcctagagctgaagggcagcgagacgacctttatgtgcgagtacgccgacgagacggccacgattgttgaattcctgaaccggtggatcaccttctgccaatcgattataagcaccctgacc

SEQ ID NO: 33320 - DNA, 459 bp, synthetic construct
  misc_feature 1..459: note = Description of Artificial Sequence: Synthetic coding sequence
  source 1..459: mol_type = other DNA
atgtaccgcatgcaactcctgagttgtattgctttgtctctggcactggttacaaactcagcaccaaccagtagcagtactaagaaaacacaactccagctggagcaccttcttctagatttgcaaatgatcctcaacggaatcaataattataagaacccaaaactgaccagaatgctgacttttaagttctatatgcccaagaaggctacagaactgaagcacctgcaatgcttggaagaggagctcaagcctctagaagaagtgctcaatctagcgcaatcaaaaaacttccacctgagaccgcgcgatctgatctccaatatcaacgttatcgttctggaacttaaggggagcgagaccacattcatgtgcgaatacgctgatgagactgctacaatcgtcgaattcctgaacagatggatcaccttttgccaatcgataatctcaactcttacc

SEQ ID NO: 33321 - DNA, 459 bp, synthetic construct
  misc_feature 1..459: note = Description of Artificial Sequence: Synthetic coding sequence
  source 1..459: mol_type = other DNA
atgtaccggatgcagctcctgtcctgcatcgccctttctctggccctcgtgaccaattcggccccaacgagttccagcactaaaaagactcaactgcaacttgaacaccttttgctcgatctccagatgatcctgaacggaatcaacaactacaagaacccgaagctcactagaatgctgacctttaagttttacatgcctaagaaggcgactgaactgaaacatctgcaatgcctcgaggaggagctgaagccactggaagaagtgctgaatctggctcagtcgaaaaacttccacttgcgcccgcgcgacctgatctccaacatcaatgtgattgtactggagttgaagggctcagaaaccactttcatgtgcgaatacgcagacgaaacggcgaccatcgtcgagttcctgaaccggtggatcactttctgtcagtcaatcatttctaccctcacg

SEQ ID NO: 33322 - DNA, 459 bp, synthetic construct
  misc_feature 1..459: note = Description of Artificial Sequence: Synthetic coding sequence
  source 1..459: mol_type = other DNA
atgtacaggatgcagttactttcttgcattgcccttagtctcgctctcgtgacaaactcagcgcctacctccagtagcaccaagaaaactcagctccaactggaacatctgctgctggatctgcagatgatactgaatggcataaataactacaaaaaccccaaacttacacggatgttgacatttaaattctatatgcccaagaaagctactgagcttaaacatttgcagtgtcttgaagaggagctgaagccccttgaagaggtgttgaacttagcacagtctaaaaactttcacctgcgcccccgtgacctgatatcaaatataaacgtgatcgtgctggagctgaagggctccgagacgacctttatgtgtgagtacgcagatgagacagcgaccatcgtcgaattcttaaaccgctggataaccttttgtcaatctataatctccacactcacc

SEQ ID NO: 33323 - DNA, 459 bp, synthetic construct
  misc_feature 1..459: note = Description of Artificial Sequence: Synthetic coding sequence
  source 1..459: mol_type = other DNA
atgtatcgcatgcagctgctgagttgtatcgcgctatcactggccctggtcaccaattcagcccccaccagtagttctaccaagaagacccaacttcagttggagcacctactgctggacttacaaatgatcctgaacggaataaataattacaaaaatcccaaactaacgcgcatgctcacatttaagttttatatgcccaaaaaagctactgaattgaagcatttgcagtgtcttgaggaggaactaaagccgctggaggaggtgttgaacctggcacagtctaagaactttcacctgcggcccagggacctgatctcaaatataaacgtgattgtgctcgagctgaaggggtcggaaacgacgtttatgtgcgagtatgcggacgagaccgcaactatcgtggagttcctgaacaggtggatcactttctgccagagtatcatttctaccttaacc

SEQ ID NO: 33324 - DNA, 459 bp, synthetic construct
  misc_feature 1..459: note = Description of Artificial Sequence: Synthetic coding sequence
  source 1..459: mol_type = other DNA
atgtacaggatgcaactgctgtcctgcattgcgttgtctcttgcactcgtcactaactccgcaccaacgagctcgtccaccaaaaagactcagcttcaacttgaacacctcctgctggatcttcagatgattctgaacggtattaacaactacaaaaacccaaaacttactagaatgctgacgtttaagttttacatgcctaaaaaggcaaccgaattgaagcatctgcaatgtttggaagaagagctgaagcctcttgaggaagtgctcaaccttgctcaaagcaagaattttcacctcaggccccgggacctgatatcgaacattaatgtcatcgtgctcgaacttaaggggtcggaaaccaccttcatgtgtgagtacgccgatgagactgcaaccatcgtcgaatttcttaatcggtggatcactttttgtcaatccattatctcgactctgacc

SEQ ID NO: 33325 - DNA, 459 bp, synthetic construct
  misc_feature 1..459: note = Description of Artificial Sequence: Synthetic coding sequence
  source 1..459: mol_type = other DNA
atgtataggatgcagctgctgtcttgcatagccctgtcactagccctagtcaccaacagcgcaccaaccagctcaagcacaaaaaagacccagcttcagttggagcatctcctgctcgatcttcagatgattttaaacggcatcaataattataagaaccctaaactcacccgaatgctgaccttcaaattttatatgccaaagaaggccaccgaactcaagcatctgcaatgtcttgaagaggagctcaagcctttggaggaagtcctgaatcttgcacagtccaagaacttccatctgagaccccgcgacctgatctcaaatatcaatgtaatcgtcttagaactaaagggatcggagaccacattcatgtgcgagtacgccgacgaaaccgcaaccatcgtggaatttctgaacagatggatcactttctgccagagcataatttctaccctgacc

SEQ ID NO: 33326 - DNA, 459 bp, synthetic construct
  misc_feature 1..459: note = Description of Artificial Sequence: Synthetic coding sequence
  source 1..459: mol_type = other DNA
atgtacaggatgcagctactgtcctgtatcgctctgtctctggcactcgtaaccaactctgctccgaccagttcctcaacgaagaagacgcagttgcagttggaacacctcctgctggacctgcaaatgattctcaatggtattaataactataaaaatccaaaactcactagaatgctgacattcaaattctatatgccgaagaaggcaacagagctgaaacaccttcagtgcctcgaggaggagctgaagcctctagaggaggtgctaaacctggcccagtcaaagaatttccacctgaggccccgcgatttaatcagtaatatcaatgtcattgtcctggagcttaagggatctgaaacaaccttcatgtgtgagtacgcagacgagacagctaccatcgtggaattccttaaccggtggattacgttttgccagtcaatcatatccactctaacc

SEQ ID NO: 33327 - DNA, 459 bp, synthetic construct
  misc_feature 1..459: note = Description of Artificial Sequence: Synthetic coding sequence
  source 1..459: mol_type = other DNA
atgtaccgcatgcagctgctctcatgcattgctctgtcgctggcgcttgtcactaatagcgcaccaacctcctcctccaccaaaaagacccaacttcagctggaacatcttctgcttgacctccagatgatactcaatggtatcaataactacaaaaaccccaaacttacccgaatgttgacctttaagttttacatgcctaagaaagcgactgagcttaagcatttgcaatgccttgaagaagaactcaagccactggaagaggtgctgaacctggcgcaatcaaagaactttcatctccgcccgcgtgaccttatttccaacatcaatgtgattgtccttgaactgaaaggatcggaaaccacctttatgtgtgaatacgctgatgagactgcaacgattgtggagtttcttaatcggtggataactttttgtcagtcgattatctccactctgacc

SEQ ID NO: 33328 - DNA, 459 bp, synthetic construct
  misc_feature 1..459: note = Description of Artificial Sequence: Synthetic coding sequence
  source 1..459: mol_type = other DNA
atgtatcggatgcagcttcttagctgcatcgcactgtcattggccttggtcaccaattcagcgccgacctcctcttcgactaagaaaacgcagcttcagctggaacaccttctgctggacttgcagatgattttgaacggaatcaataactacaagaacccgaaactcacgagaatgctcaccttcaaattctacatgcccaagaaggcgaccgagctcaagcacctgcaatgtttggaggaggaactgaaaccattggaagaagtgctcaaccttgctcaatccaagaattttcatctgcggcctcgagatttgatatcgaacataaacgtgattgtgctggaactgaagggctcggagacgactttcatgtgcgagtacgccgacgagactgccaccatcgtcgaatttcttaatcgctggatcaccttctgccagagcatcatctcaaccctgacc

SEQ ID NO: 33329 - DNA, 459 bp, synthetic construct
  misc_feature 1..459: note = Description of Artificial Sequence: Synthetic coding sequence
  source 1..459: mol_type = other DNA
atgtatagaatgcagctgctgtcctgcattgctctttccctggctcttgttactaactcagcacccacctctagcagtactaagaaaacacagctgcagttggaacacctgctgctcgacctccagatgatcctcaacggaatcaataattataaaaatcccaaactgaccaggatgctcacattcaagttttacatgccaaagaaagcgacagaactgaagcacctgcagtgtctggaggaggaactgaagcctctggaggaggtcctcaatctggcgcagtctaagaattttcacctgaggcctcgggatctcatctctaacataaatgtcatcgtgttggagctgaaaggtagcgagactaccttcatgtgtgaatatgctgatgaaaccgccacaatcgtcgaattcctgaatcgctggattactttttgccagtctattattagcactttgacc

SEQ ID NO: 33330 - DNA, 459 bp, synthetic construct
  misc_feature 1..459: note = Description of Artificial Sequence: Synthetic coding sequence
  source 1..459: mol_type = other DNA
atgtacagaatgcaattgctctcttgtatagcactttccctcgcactcgtcaccaattccgcccctacttcatcgtccaccaagaaaactcaacttcagctcgaacatcttcttctcgacctgcagatgatccttaacggcattaacaattacaagaatcccaaattgactagaatgttgacttttaagttctatatgcctaagaaggccaccgaacttaagcatcttcagtgtctggaagaagaactcaaaccgctggaagaagtgctcaatcttgcccagagcaaaaacttccatctgcgtcctcgggatttgatttccaacattaatgtgatcgtgcttgaacttaaggggtcagaaaccacctttatgtgcgaatacgctgatgaaactgcaaccattgtcgagtttcttaaccggtggataacgttttgccaatccatcattagcaccctgact

SEQ ID NO: 33331 - DNA, 459 bp, synthetic construct
  misc_feature 1..459: note = Description of Artificial Sequence: Synthetic coding sequence
  source 1..459: mol_type = other DNA
atgtacagaatgcaacttctgtcgtgtattgcattgtcgctggccctggtgactaacagcgccccaacctcaagctctaccaaaaagacccaacttcaactggagcacctcttgcttgacctccagatgatactcaacggtattaacaattacaagaacccaaaacttactaggatgcttactttcaaattctacatgcctaagaaggcgaccgaactcaagcatcttcagtgccttgaggaggaattgaagcctctggaggaggtgctgaatctcgcccagtcgaagaactttcatcttagaccgagggatttgatttccaacattaacgtgatcgtgcttgaactcaagggaagcgaaactacttttatgtgcgaatacgctgatgaaaccgcaactattgtggaattccttaaccgttggattactttctgtcaaagcattatctctacccttacc

SEQ ID NO: 33332 - DNA, 459 bp, synthetic construct
  misc_feature 1..459: note = Description of Artificial Sequence: Synthetic coding sequence
  source 1..459: mol_type = other DNA
atgtaccggatgcagctcctctcatgcatcgcgttgagcctcgcgctcgttaccaactccgccccaacctcttcatcgaccaaaaagactcagctgcaacttgagcatctgctgctggatctccagatgatcttgaacggcatcaataactacaagaatccgaaattgactaggatgctgacctttaagttttacatgcccaagaaagcgactgagctgaagcacctccagtgccttgaggaagaacttaagcctctggaagaagtgctgaatctggcccagtcaaagaatttccatctccgcccgcgcgacctgatctcgaatatcaatgtcatcgtgttggaactgaagggttccgagactaccttcatgtgcgagtatgctgacgagactgccacgattgtggaattcctgaatcggtggataacgttctgtcaatccatcattagcactctgacc

SEQ ID NO: 33333 - DNA, 459 bp, synthetic construct
  misc_feature 1..459: note = Description of Artificial Sequence: Synthetic coding sequence
  source 1..459: mol_type = other DNA
atgtataggatgcagctgctgagctgtatcgccctgagccttgcacttgtgaccaactcagcacctacttcatcaagtactaagaagacacagttgcagcttgagcacctgctccttgatctccagatgatcttgaacggtattaataactacaaaaatcctaaactcactcggatgttgacatttaagttctatatgcccaaaaaggcaacggaactcaaacacctccagtgtttggaggaggaactgaagccacttgaggaagtgcttaacttggcgcagagcaaaaactttcatctgcggcctcgggatctcatatccaacataaacgtgatcgttctcgagctgaaaggttccgaaactacatttatgtgtgaatacgctgacgagacagctaccatcgtcgagtttttgaaccgatggataactttttgtcagagcatcatttctacactgacc

SEQ ID NO: 33334 - DNA, 459 bp, synthetic construct
  misc_feature 1..459: note = Description of Artificial Sequence: Synthetic coding sequence
  source 1..459: mol_type = other DNA
atgtacaggatgcagctgttgtcatgtatagcactaagcctcgctctcgtgacaaactccgcccctacctcctccagcaccaagaaaacccagctgcagctggaacacctgctgttggatctacagatgattctcaatggaatcaacaattacaagaaccctaaactgactagaatgctgactttcaaattttacatgccaaagaaagcgacagagttgaagcacctccagtgccttgaggaagagttgaaaccactcgaggaggtgctgaacctggcccagtctaaaaactttcacctgcggcccagagacctgatatctaatattaatgttatagtgctggagttgaaaggctcggagactacgtttatgtgtgaatatgccgacgagacggccaccatagtcgaatttttaaatcgctggattaccttttgtcagtccatcatctccactctgacc

SEQ ID NO: 33335 - DNA, 459 bp, synthetic construct
  misc_feature 1..459: note = Description of Artificial Sequence: Synthetic coding sequence
  source 1..459: mol_type = other DNA
atgtacagaatgcaactgttgtcctgtattgccctctcgctggcacttgtcactaacagcgcccccacttctagctcgaccaaaaagacccagctccagcttgagcacctgttgcttgatctccagatgatcctgaatgggatcaataactacaagaacccaaaactcactcgaatgctcacctttaagttttacatgcctaagaaggcaaccgaacttaaacatctgcaatgcttggaagaggaactgaagcctttggaagaagtgcttaacctggctcaatccaagaattttcatttgaggccgcgcgacttgatcagtaacataaacgtcattgtgcttgaactgaagggttcggagactaccttcatgtgtgaatacgcagatgagactgcgacgattgtggaattcctgaatcggtggattacgttttgtcaatccatcattagtactcttacc

SEQ ID NO: 33336 - DNA, 459 bp, synthetic construct
  misc_feature 1..459: note = Description of Artificial Sequence: Synthetic coding sequence
  source 1..459: mol_type = other DNA
atgtacagaatgcaactgctgagttgtatcgctctcagcctggccctcgtgacaaactccgccccgacaagctcctctactaaaaaaacccaactgcagctcgaacacctgctactggaccttcagatgatccttaatggcatcaacaactacaagaatcccaaactgacgcgtatgctgacatttaaattttatatgcccaagaaggcaaccgagctcaagcatctacaatgtttggaggaggagctgaagcctctggaggaagtgctcaacctggctcagtctaaaaatttccacttacgccccagggacttgataagcaacatcaatgtgatcgtgctggaactgaagggatcggagaccacatttatgtgtgagtatgcggacgaaaccgctaccatagtggagttcctgaacagatggataacgttctgtcagtcaatcatttccacccttacc

SEQ ID NO: 33337 - DNA, 459 bp, synthetic construct
  misc_feature 1..459: note = Description of Artificial Sequence: Synthetic coding sequence
  source 1..459: mol_type = other DNA
atgtacagaatgcagctcctgtcctgtattgcactgtcgttggcactcgtcaccaattcggcacctacttcaagctcaaccaaaaagactcagcttcagttggaacacctgcttctcgatcttcagatgatcctgaacggtatcaacaactataagaaccctaaacttactcgcatgctgacctttaagttctacatgccaaagaaagcaacggaactcaaacatcttcaatgtctggaggaagagctgaagccacttgaagaggtgctgaacctcgcgcagtctaaaaacttccatctccggcctcgtgatctgataagcaacataaacgtgattgtccttgaactcaagggatcggaaaccacgtttatgtgtgaatacgcagacgagactgccaccattgtggaattcctgaaccgctggattaccttttgccaatcaattatctcgactcttact

SEQ ID NO: 33338 - DNA, 459 bp, synthetic construct
  misc_feature 1..459: note = Description of Artificial Sequence: Synthetic coding sequence
  source 1..459: mol_type = other DNA
atgtataggatgcagctgttgagctgtatcgccctgtcgctggcgctggtcacgaactccgcgcctacttcgtcatcgaccaaaaagacccagcttcaactcgagcacctcctgctggatttgcagatgattttgaacggaatcaacaattacaagaatccaaagctgactcggatgctgacctttaagttctacatgcccaagaaggcaacggagctgaagcatctccagtgcctggaagaagaactgaagcctcttgaggaggtgctgaacctcgcacaaagcaagaatttccatctgcgcccgcgagatctcatctcaaacatcaacgtgatcgtgctggaactgaagggttcggaaaccactttcatgtgtgagtacgccgacgaaaccgcaaccatcgtggaattcctgaaccggtggatcactttctgccagagcatcatctcgactcttact

SEQ ID NO: 33339 - DNA, 459 bp, synthetic construct
  misc_feature 1..459: note = Description of Artificial Sequence: Synthetic coding sequence
  source 1..459: mol_type = other DNA
atgtaccggatgcagcttttatcctgcatcgccttgtccctggcgttggtgactaactctgccccaaccagtagtagtacaaagaagacccagctgcagctggagcacctcctgttagacctgcaaatgatattaaatggtatcaataactacaagaaccccaagctgacccgtatgctgactttcaagttctacatgcccaaaaaggccactgaactgaaacacctgcagtgtctagaggaagaactaaagcctctggaagaagtattaaatctggcccagtctaagaactttcatttgagaccacgagatctcatctctaacataaatgtgatagtgctggaacttaaagggtctgaaaccactttcatgtgcgaatatgctgacgaaacagctacaattgtcgaatttctgaatcgttggattactttctgtcaaagtatcattagcaccttaact

SEQ ID NO: 33340 - DNA, 459 bp, synthetic construct
  misc_feature 1..459: note = Description of Artificial Sequence: Synthetic coding sequence
  source 1..459: mol_type = other DNA
atgtaccgtatgcaactattgtcatgcattgccctttcgctcgctctggttacaaattccgcgccaaccagctcctccaccaaaaagacccagctgcaattggaacaccttctgctggaccttcagatgatcctgaacggtattaataactataagaaccctaagcttacccggatgttgactttcaagttctatatgccgaagaaggccactgaattgaagcatctccagtgcctcgaagaggagctgaaaccgctggaagaggtacttaatttagctcagtcgaagaactttcatctgcgcccccgagacttgatcagtaacatcaatgttatcgtactcgagttgaagggttctgagacaactttcatgtgcgagtacgcggatgagaccgcaacaattgttgagtttctgaacagatggattaccttttgtcagtctattatctccacattgaca

SEQ ID NO: 33341 - DNA, 459 bp, synthetic construct
  misc_feature 1..459: note = Description of Artificial Sequence: Synthetic coding sequence
  source 1..459: mol_type = other DNA
atgtaccgtatgcagttgctgtcgtgtatcgcactgtcgttggcgctggtgactaacagcgctccaacttcttccagtacgaaaaagactcagctccaactcgagcacctcctgctcgatctccagatgatcctgaacggcattaacaactacaagaatcccaagctgactcggatgctgactttcaaattctacatgccgaagaaagcgaccgagctgaaacacctccagtgcctggaggaagaactgaagccgctggaagaggtgcttaatctcgctcaatccaagaattttcacctccggcctcgggaccttatcagcaatatcaacgtgatcgtcttggaactcaagggctccgaaaccaccttcatgtgcgagtatgcagacgaaactgccactatcgttgagttcctgaatcgctggattaccttctgtcagtcaatcatctccacgctgacc

SEQ ID NO: 33342 - DNA, 459 bp, synthetic construct
  misc_feature 1..459: note = Description of Artificial Sequence: Synthetic coding sequence
  source 1..459: mol_type = other DNA
atgtatcgcatgcagctgctctcttgcatcgccttatcactggcattggtgacaaatagcgccccgacatcaagctccaccaagaagactcaacttcagctcgagcatctcctgctggatcttcagatgatccttaacggaattaataattacaagaatcccaagctaactaggatgctgacattcaaattctatatgccaaagaaagctacagaactgaaacacctccagtgcctggaagaagagctgaaaccactggaggaggtgctcaacctcgcacagtcgaagaactttcatctgcggccccgcgacctcatctcgaatatcaatgtgattgtactcgagttgaaagggagcgagactacttttatgtgcgaatacgccgatgaaacagcaaccatagttgagttccttaacagatggattaccttctgccagagcatcatatctacccttacc

SEQ ID NO: 33343 - DNA, 459 bp, synthetic construct
  misc_feature 1..459: note = Description of Artificial Sequence: Synthetic coding sequence
  source 1..459: mol_type = other DNA
atgtacaggatgcagctgttgtcctgcattgcactgagcctggcactggtgacgaactctgcaccgacttcatcctcaacgaaaaagacgcagctacagttagagcacctcctcctggacctgcaaatgatactaaacggtattaacaactacaagaatccgaagctgacacgaatgctgacttttaagttctatatgcccaagaaggccaccgagctaaagcatctgcaatgcctggaggaggaattaaagcccctcgaggaggtgttaaacctcgctcagagcaagaacttccacctcagaccaagggatctgatttccaatataaacgttatagttctggaactcaagggcagtgaaaccaccttcatgtgcgaatatgcagatgagactgccactattgtagaattcctgaatcgttggatcaccttttgccaatcgattatcagcaccctgacg

SEQ ID NO: 33344 - DNA, 459 bp, synthetic construct
  misc_feature 1..459: note = Description of Artificial Sequence: Synthetic coding sequence
  source 1..459: mol_type = other DNA
atgtacaggatgcagctcctgtcctgcatcgcgctctccctggcactcgtgaccaactcggccccaacttcgtcatcgaccaagaaaacccagcttcaactggaacacctgctcttggacctccaaatgatcctgaacggaattaacaactacaagaatccgaagctcactagaatgctgacttttaagttctacatgccgaagaaggctaccgagctgaagcacctgcagtgtctcgaagaggagctgaagcccctggaagaagtcctgaatttggcgcaaagcaaaaactttcacctccggccacgcgacctcatctcaaacattaacgtgatcgtcttggagctgaagggctccgaaaccaccttcatgtgtgaatatgccgatgaaacggcgaccatcgtcgaatttctgaatcggtggattactttctgccaaagcatcatctcgaccctgacc

SEQ ID NO: 33345 - DNA, 459 bp, synthetic construct
  misc_feature 1..459: note = Description of Artificial Sequence: Synthetic coding sequence
  source 1..459: mol_type = other DNA
atgtaccggatgcaactgctctcctgtatcgctctatccctggcactggtcaccaacagtgcccccacaagtagcagcaccaagaaaactcagctgcaactggagcacttgctgcttgatctgcagatgatactcaatggaataaataattacaagaacccaaaacttacccgcatgcttacctttaagttctacatgccgaagaaggcaacggaactgaagcacctgcaatgcctggaagaggaactgaaacctctggaagaagtcctgaatctggctcagagtaagaacttccatctacgcccgagggacctgattagtaacattaacgtgattgtgctggaattgaaaggctccgagactaccttcatgtgtgaatacgctgacgagacagcaacgatagtggaattcctaaaccggtggataacattctgtcagtcaattataagcacactaaca

SEQ ID NO: 33346 - DNA, 459 bp, synthetic construct
  misc_feature 1..459: note = Description of Artificial Sequence: Synthetic coding sequence
  source 1..459: mol_type = other DNA
atgtaccgcatgcagctcctttcatgcatcgccctgtcactcgcactcgtgacgaattcagccccaacttcgtcgtccaccaaaaagactcagctgcaactcgagcacctgcttctggaccttcaaatgatcctcaacggaatcaacaactataagaacccgaagctgactcggatgctcacttttaagttctacatgcccaagaaggcaactgaactgaaacatctgcagtgtctggaagaagagcttaagccgctcgaggaagtgttgaacctggcccaatcgaagaactttcacctgcggccgagggatcttatctccaatatcaacgtgatcgtgctcgaattgaagggaagcgaaaccacctttatgtgcgaatacgcggacgagacggccactattgtcgaattcctcaaccgctggattactttctgtcagtcgataatctcgaccctgacc

SEQ ID NO: 33347 - DNA, 459 bp, synthetic construct
  misc_feature 1..459: note = Description of Artificial Sequence: Synthetic coding sequence
  source 1..459: mol_type = other DNA
atgtacaggatgcaactattgtcctgtattgcactgtcgttggccttggtgacaaactccgccccaacctcctcaagtaccaaaaaaacccagctgcagctggaacacctgctactggatctgcaaatgattctaaacggaatcaacaactataagaatcccaagctgacccgtatgctgactttcaagttttacatgcccaaaaaggccacggaactaaagcaccttcagtgtctggaagaggaattaaaaccgctcgaggaagtcctaaatctggcccaatccaaaaatttccacctgcgccccagagaccttatctctaacattaacgttatcgttctggaactgaaaggatccgagacgacgtttatgtgcgagtacgctgatgaaacggctacaatcgtggagttccttaataggtggatcacattttgccaaagtataattagtactttgacg

SEQ ID NO: 33348 - DNA, 459 bp, synthetic construct
  misc_feature 1..459: note = Description of Artificial Sequence: Synthetic coding sequence
  source 1..459: mol_type = other DNA
atgtaccgtatgcagctgctgtcctgtatcgcactctccctggccctcgtgacgaacagcgcacctacctcgtcctcgaccaaaaagactcagttgcaacttgaacatctcctgctcgacctccagatgatactgaacgggattaacaactacaagaacccaaagctgaccaggatgctcaccttcaagttttacatgcctaagaaagcaactgagctgaagcacctccaatgtctcgaagaagagctcaaaccccttgaagaagtgcttaatctcgcacaatcaaaaaactttcatcttcgccctagggatctcatctccaatatcaatgtcattgtcctggagctcaaaggctccgaaaccactttcatgtgcgaatacgcagacgaaactgctactattgtggaattcctcaatagatggataacgttctgtcaatcgatcatcagcactctgacc

SEQ ID NO: 33349 - DNA, 459 bp, synthetic construct
  misc_feature 1..459: note = Description of Artificial Sequence: Synthetic coding sequence
  source 1..459: mol_type = other DNA
atgtatcgaatgcagttactaagttgtattgccctcagcctagcccttgtgaccaattccgctcctacttcctcatcaaccaagaaaacccagctccagctggagcatctcttgctggatcttcagatgatccttaacgggattaataattataaaaaccccaagctgaccaggatgctcacttttaaattttatatgcccaaaaaggcaaccgaactgaagcaccttcagtgtctggaggaagagctcaagcccctggaggaagtcttgaacctggcacagtcgaagaatttccacctcagacctagagaccttatcagcaatatcaatgttatcgtgctagaattgaaaggctcagagacaacatttatgtgtgaatacgccgatgaaacagctacaattgtcgaattcctgaatcgttggatcacattttgtcagagtattatttccacactgacc

SEQ ID NO: 33350 - DNA, 459 bp, synthetic construct
  misc_feature 1..459: note = Description of Artificial Sequence: Synthetic coding sequence
  source 1..459: mol_type = other DNA
atgtatcggatgcaactactcagctgcatcgcactctcgttggcgctggtgacgaacagtgcgcccacctcctcatctaccaagaagactcaactgcaacttgagcacttgcttcttgatctgcagatgatcctgaacggcatcaacaactacaagaacccgaaactcactagaatgctcacctttaagttctatatgcctaagaaagcaaccgagcttaagcacttgcagtgcctcgaagaggagctcaagcccttggaggaggtcctcaacctggcacagtctaagaatttccatttacgcccccgggacctcatctctaacatcaacgtaatagtactcgagctgaagggctcggaaaccaccttcatgtgtgagtatgctgatgaaaccgccacgattgtcgagttccttaaccggtggattactttttgtcagtcgattatcagcaccctcacc

SEQ ID NO: 33351 - DNA, 459 bp, synthetic construct
  misc_feature 1..459: note = Description of Artificial Sequence: Synthetic coding sequence
  source 1..459: mol_type = other DNA
atgtaccggatgcagcttctgagctgtattgccctgagtctcgcgctcgtcacgaacagcgcccccacatcatcatccaccaaaaaaactcagcttcaactggaacacctgcttttggacttgcagatgatcctgaacggaattaataattacaagaatcctaagctcacccgcatgctcactttcaaattctacatgccaaaaaaggctacagaactgaagcacctgcagtgtctggaagaagagctcaaacctctggaggaggtgcttaatctggctcagtctaaaaatttccacctgcgacctagggatttgatctctaacatcaacgtgattgtcctggaactgaagggctctgagaccacgttcatgtgtgaatacgctgacgagacagccactatcgtagagtttctgaataggtggataactttttgccagagcatcataagcacccttaca

SEQ ID NO: 33352 - DNA, 459 bp, synthetic construct
  misc_feature 1..459: note = Description of Artificial Sequence: Synthetic coding sequence
  source 1..459: mol_type = other DNA
atgtacaggatgcaactccttagctgtatcgcactttcacttgcactggtcaccaactccgcccctaccagctcctcgaccaaaaagactcaattgcagcttgaacatctgctgctggatcttcaaatgatcctgaacggaatcaataactacaagaacccaaagctgacccgcatgcttacctttaagttctatatgcctaaaaaggcgacggaacttaagcacctgcagtgcctggaagaagagcttaagccacttgaagaagtgttgaacctcgcccagtccaaaaactttcacctcaggccgcgtgatctgatcagcaacatcaatgtcatagtgcttgaactcaagggctccgaaaccaccttcatgtgtgagtacgccgacgaaaccgcaacgattgtggagtttctgaataggtggattactttctgccaatcgatcatttcgacgcttact

SEQ ID NO: 33353 - DNA, 459 bp, synthetic construct
  misc_feature 1..459: note = Description of Artificial Sequence: Synthetic coding sequence
  source 1..459: mol_type = other DNA
atgtaccgaatgcagctgctgtcctgcattgccttgtccctcgcgctcgtgacgaattctgcccctacatccagcagtacgaagaagacgcagctgcagttagagcatttgctgctggacctccagatgattctgaatggaataaataactacaagaatccaaaattaacacgaatgctcacattcaagttctatatgcccaaaaaggctactgaattaaaacaccttcaatgtctagaagaagagctaaaaccgctggaagaagtcttgaacttggcacagtcaaagaattttcatctgaggcctcgcgacttgatcagtaacattaacgttatcgtcttagaattaaagggttctgagacgacattcatgtgtgagtacgccgatgaaacagctacgattgtagaattcttgaaccgttggattacattctgtcagtccattatctcaactttgacg

SEQ ID NO: 33354 - DNA, 459 bp, synthetic construct
  misc_feature 1..459: note = Description of Artificial Sequence: Synthetic coding sequence
  source 1..459: mol_type = other DNA
atgtataggatgcagctcctctcatgcattgctttgagcctggccctggtcacaaactcagcacccacttcatctagcaccaagaaaactcagctgcagttggaacacctgctgctggaccttcagatgattctcaatggaatcaataattataagaaccctaagctgacccgcatgttgacattcaaattctatatgcctaagaaggccaccgaattgaagcacctgcagtgcttggaagaggaactgaaacctttggaagaggtgctcaacttggctcagtccaagaactttcatttgagaccacgtgatcttatctcaaacattaacgtgattgttctggaactcaaaggctctgaaactaccttcatgtgcgaatacgctgacgagacagctactattgtagagtttctcaataggtggataaccttctgccagagcattatatccaccctgacc

SEQ ID NO: 33355 - DNA, 459 bp, synthetic construct
  misc_feature 1..459: note = Description of Artificial Sequence: Synthetic coding sequence
  source 1..459: mol_type = other DNA
atgtatcggatgcagctgttgtcctgcatcgctctcagtctggccctggtcaccaacagtgcacctacatcaagctctacaaaaaagacacagttgcagttggagcacctgctacttgacctgcaaatgattctcaatggaattaacaattacaagaatccgaagctcacccgaatgctgacctttaaattttacatgccgaagaaggctactgagttaaaacacctgcagtgtcttgaggaggagttgaaaccactagaggaagttctgaacctggctcagagcaagaattttcacctgaggccgcgagacctgatctcaaacatcaatgtgatcgtgctcgagctcaaaggctcagagactacattcatgtgcgagtatgcagacgagaccgccactatcgtggagttcctaaatcgctggatcacattttgccagagcattatcagcactctaact

SEQ ID NO: 33356 - DNA, 459 bp, synthetic construct
  misc_feature 1..459: note = Description of Artificial Sequence: Synthetic coding sequence
  source 1..459: mol_type = other DNA
atgtataggatgcagcttttgtcttgcatcgcactgagcctggcattagttacaaactccgccccaacaagctcaagcaccaagaaaactcaactccagctggagcacctgctgcttgaccttcagatgatcctcaatggaattaacaactacaaaaaccctaagctgaccagaatgcttacattcaagttctatatgccaaaaaaggctaccgagctgaagcacctccaatgtctggaagaagaactgaagcctttggaagaagtgttgaatttggcccagagcaagaatttccacttacggccccgggacctgatatcaaatatcaatgttatcgtattggaactgaaaggctccgagacgacattcatgtgcgagtacgccgatgagactgctactatagtggagttcctcaaccgctggataacattttgtcaaagtataattagtacactcacg

SEQ ID NO: 33357 - DNA, 459 bp, synthetic construct
  misc_feature 1..459: note = Description of Artificial Sequence: Synthetic coding sequence
  source 1..459: mol_type = other DNA
atgtatcgcatgcagctgctgagctgtatagccctctccctggccctggtgactaacagcgctcctacctcgagctctactaaaaagactcaattgcagttagaacatctgctcctggacctccagatgattctgaatggcataaataactacaagaatcctaagctgacccgtatgcttacgttcaagttctatatgcctaagaaggccacggaacttaagcacttgcagtgtctagaagaggagctgaaaccgctagaggaggtgctcaatctggcccaaagcaagaattttcatctgcgtccgcgagatctcatttctaatattaatgtgattgttctggagctcaagggatccgagacaacctttatgtgtgagtacgctgatgagaccgccacgatcgtggagttcctgaaccgttggataacgttctgtcagagcatcatctctacacttacc

SEQ ID NO: 33358 - DNA, 459 bp, synthetic construct
  misc_feature 1..459: note = Description of Artificial Sequence: Synthetic coding sequence
  source 1..459: mol_type = other DNA
atgtacaggatgcaattgcttagctgcatagccctttcgcttgcactggtgactaattcggcgcccacctcttcgtccactaagaaaactcagctgcaactggagcacttgctccttgaccttcagatgattctgaatggtattaacaactacaagaatcctaaacttactagaatgctcacttttaagttttacatgccgaaaaaggcaactgaacttaaacatctgcaatgcctggaggaagagttgaagcctctcgaagaggtgctcaacctggcacagagcaagaacttccatcttagaccccgtgatctgatatcaaacatcaacgtcattgtgctggagcttaaagggtccgagactactttcatgtgtgaatacgcagatgaaaccgcaaccattgtggaatttcttaaccggtggattactttctgccaatcgatcatctccactctgacc

SEQ ID NO: 33359 - DNA, 459 bp, synthetic construct
  misc_feature 1..459: note = Description of Artificial Sequence: Synthetic coding sequence
  source 1..459: mol_type = other DNA
atgtacaggatgcagcttcttagttgtatcgccctttccttggcccttgttactaatagtgccccgacgagctcctcaacaaagaaaacacagttgcaactggagcacctgttgctcgatttgcaaatgatcttaaacggcatcaacaactacaagaaccccaaactcacgagaatgcttacatttaagttctacatgccaaagaaagccaccgaactgaaacaccttcaatgtcttgaagaagagctaaagcctctcgaagaagtccttaaccttgcgcagtctaagaactttcatctccgaccgagagaccttatcagtaatataaacgtaattgttttggaactaaagggaagcgaaacaacgttcatgtgtgaatacgccgacgaaaccgctaccatagtggaattcttaaatcggtggatcacattctgccaaagtatcattagcacgctcact

SEQ ID NO: 33360 - DNA, 459 bp, synthetic construct
  misc_feature 1..459: note = Description of Artificial Sequence: Synthetic coding sequence
  source 1..459: mol_type = other DNA
atgtatcggatgcaactcttgagctgtatagcactgtcactggccttggtaacaaatagtgcccccacgtcctcttctaccaagaaaacccagctccagctggagcatcttcttctagatttgcaaatgatactgaatggcattaataattacaagaatcctaaactaacccggatgcttacctttaagttctacatgccaaagaaagccaccgagctgaagcatctccagtgtttggaggaggaactgaagccactggaagaggttctgaatttggctcagagtaaaaactttcatctcaggcctagggacttaatctcaaatatcaacgtgatcgtgctggaactcaaggggagcgagaccacgtttatgtgcgaatacgcagacgagacggcaaccatcgtcgagttcctgaatagatggatcaccttctgtcagtcgattatctccactctgacg

SEQ ID NO: 33361 - DNA, 459 bp, synthetic construct
  misc_feature 1..459: note = Description of Artificial Sequence: Synthetic coding sequence
  source 1..459: mol_type = other DNA
atgtaccggatgcagttgctgtcctgtatcgccctgtctctcgcactcgtaactaactctgctccaaccagcagcagtacgaagaagacccagctgcaactagaacacctcctcctcgacctgcagatgattctcaacggcatcaacaattacaaaaatccaaagctcaccaggatgttgaccttcaaattctacatgcccaaaaaggccaccgaattgaagcacctccagtgtttagaggaggagttgaagcccctggaggaagtcctcaacctggcccagtccaagaatttccacctgcgtcctagagatctgatcagcaatatcaatgtgatcgtgctggaacttaagggctctgagaccacctttatgtgcgagtatgcggacgaaaccgccacaattgtggagttcctgaacaggtggatcactttttgtcaaagtataataagcactttaaca

SEQ ID NO: 33362 - DNA, 459 bp, synthetic construct
  misc_feature 1..459: note = Description of Artificial Sequence: Synthetic coding sequence
  source 1..459: mol_type = other DNA
atgtaccgaatgcaacttcttagctgtattgccctatcattggctctcgttactaactccgcacccacttccagtagcaccaaaaaaactcagctccagctggaacacctattgttggatttgcaaatgatcctgaatgggattaacaattacaaaaaccctaagctgactcgaatgctgaccttcaagttctacatgcctaaaaaagctacagagctgaaacacctgcagtgcttggaggaggaattgaagccgctcgaggaggtccttaatctcgctcaatcaaaaaattttcacttgcgcccgcgagatctgatcagtaatattaatgtaatagtgcttgagttgaagggctctgagactacctttatgtgcgagtatgccgatgagactgcgacgatcgtggagttcctcaataggtggataacattctgtcagagcataatcagcacactgacc

SEQ ID NO: 33363 - DNA, 459 bp, synthetic construct
  misc_feature 1..459: note = Description of Artificial Sequence: Synthetic coding sequence
  source 1..459: mol_type = other DNA
atgtaccgaatgcagctgctcagctgtattgcactctcgctcgctctggttactaacagcgcccctacctcgagctcgaccaaaaagactcagcttcagcttgaacatctgttgcttgacctgcaaatgattcttaatggtattaacaattacaaaaacccgaaacttactaggatgctgactttcaagttttacatgcccaagaaggcgaccgagcttaagcacctccaatgtcttgaagaagaactgaagccactggaggaagtgcttaacttggcgcaatccaagaactttcatctcagaccacgagatttgatctcgaacattaacgtgattgtgctggaactgaaagggtccgaaaccacgttcatgtgcgagtacgccgatgaaactgcaactattgtggaatttcttaaccgctggatcacgttctgtcaatcgataatcagcactttgacc

SEQ ID NO: 33364 - DNA, 459 bp, synthetic construct
  misc_feature 1..459: note = Description of Artificial Sequence: Synthetic coding sequence
  source 1..459: mol_type = other DNA
atgtacaggatgcagctgttgagctgtattgctttgtctttagctttggtaacgaattccgccccaaccagcagctcgaccaagaaaacccaactgcagttggaacacctgctgcttgatctccagatgattttgaatggcatcaacaattacaaaaaccccaagcttacaaggatgctcacatttaagttttatatgcctaagaaggctacagaactgaagcatctgcagtgcttagaagaggagcttaaacctctagaggaggttctcaacctggctcagtctaaaaactttcacctgaggccaagagaccttatttcaaatatcaacgtgatagttctggagctgaaggggtcagagaccactttcatgtgcgagtacgccgacgagactgccaccattgtggaattcctgaaccggtggattacattctgtcagtcgattatcagtactctgaca

SEQ ID NO: 33365 - DNA, 459 bp, synthetic construct
  misc_feature 1..459: note = Description of Artificial Sequence: Synthetic coding sequence
  source 1..459: mol_type = other DNA
atgtatcgaatgcagctactctcctgcattgctctgagcctggctctcgtgactaactccgcccccacgagcagttccactaagaaaacgcaactgcagctcgagcatcttttgctggatttgcaaatgattctaaacggcatcaataattacaagaatcccaaactgacccggatgctaaccttcaagttttacatgccaaaaaaagccaccgagttaaaacacttacaatgcttggaagaagaattgaagcctctggaagaggtgctgaacttggcccaaagcaaaaattttcatctgcggcctagggacctgatctcaaacatcaacgtcattgtgttggaactgaaaggaagcgagaccacatttatgtgcgagtatgccgatgagactgcaaccatcgtggaattcctgaatcggtggatcacattctgtcagtccattatctctaccttaacc

SEQ ID NO: 33366 - DNA, 459 bp, synthetic construct
  misc_feature 1..459: note = Description of Artificial Sequence: Synthetic coding sequence
  source 1..459: mol_type = other DNA
atgtatagaatgcagctgctgtcttgcatcgccctaagcctggcactggtgaccaattctgccccaacatctagctctaccaaaaaaacccagctgcagctggagcaccttctcctcgatttgcagatgatattaaatggaatcaataattacaaaaatcccaagctgacaagaatgctgaccttcaaattttacatgcctaaaaaagcaaccgagctaaaacacctgcaatgtttggaagaggaattgaagccacttgaagaggtgttaaacctggcacaatccaaaaactttcatttacggccccgggatttaattagcaatatcaacgtcattgtgctggagctgaagggcagtgaaacaaccttcatgtgtgaatacgcagatgagactgctactatcgttgaatttctgaatcgctggataaccttctgtcagtccattattagcacattaaca

SEQ ID NO: 33367 - DNA, 459 bp, synthetic construct
  misc_feature 1..459: note = Description of Artificial Sequence: Synthetic coding sequence
  source 1..459: mol_type = other DNA
atgtaccgcatgcaattgcttagctgcattgctttgtcgctcgcgcttgtgaccaactcagcccctaccagctccagtaccaaaaagacccaactgcaattggaacacctgctcctggacctccagatgattctgaacggaatcaacaactacaagaatccgaaattgacgagaatgctcacgttcaaattctacatgccgaagaaagcaaccgaactcaaacatcttcagtgtctcgaagaagagctcaagccgctggaggaggtcctgaacttggcgcagtcaaagaacttccacctgaggccccgtgatctgataagcaatatcaacgtcatcgtgcttgagttgaaagggtcggaaacgactttcatgtgcgagtatgccgacgaaactgccaccatcgtggaatttctcaatcgctggatcactttttgccagtcaatcatctccactctgacc

SEQ ID NO: 33368 - DNA, 459 bp, synthetic construct
  misc_feature 1..459: note = Description of Artificial Sequence: Synthetic coding sequence
  source 1..459: mol_type = other DNA
atgtaccgtatgcagctgctgagttgcatagctctctcccttgcgttggtcaccaattcagctcctaccagctccagtacaaagaagacccagctccagctggagcatttgttgctggatctgcaaatgatcctcaacgggatcaacaactataagaatcccaaactaacacgaatgctgaccttcaagttctatatgcccaaaaaggcaaccgagctgaagcacttgcagtgcctggaggaggaactgaaaccactggaggaagtgctcaacctggcccaaagcaagaacttccacctacggccgagggatctgatatcaaacatcaacgtcatcgtgctggagctgaaaggttccgagacaacatttatgtgcgaatatgcagacgagaccgccacaattgttgagtttctgaatcgctggatcaccttctgccaatccatcataagcactctgacc

SEQ ID NO: 33369 - DNA, 459 bp, synthetic construct
  misc_feature 1..459: note = Description of Artificial Sequence: Synthetic coding sequence
  source 1..459: mol_type = other DNA
atgtaccgaatgcagcttctgagctgcattgcactgtcactcgcgctggtcaccaacagcgcacctacctcgtcatcgactaagaaaactcaacttcaacttgaacatctgctgctcgatctccaaatgatacttaacggcattaacaactacaagaacccaaagctgactcggatgctgacctttaagttctacatgccaaagaaggcgactgagcttaagcacctgcagtgtcttgaggaggaactcaagcctttggaggaagtgctgaaccttgcacaatcgaagaactttcatctccggccaagggaccttatatcgaacatcaatgtgatcgtcctcgaattgaagggatccgaaaccaccttcatgtgtgaatacgccgatgaaaccgctaccattgtggagtttttgaacagatggattaccttttgtcagtccatcattagcacccttacc

SEQ ID NO: 33370 - DNA, 459 bp, synthetic construct
  misc_feature 1..459: note = Description of Artificial Sequence: Synthetic coding sequence
  source 1..459: mol_type = other DNA
atgtaccgcatgcagctgctgtcgtgtattgcgctttccttggcgcttgtcactaattccgcccctacgtcctcctcgacgaaaaagactcaactccaactggagcatcttctgcttgatctccaaatgatccttaacggaatcaataactataagaacccaaaacttaccagaatgcttaccttcaagttttacatgcctaaaaaggcaactgagcttaagcatcttcagtgtcttgaagaggaactgaaaccactcgaagaagttctgaacttggcacagtcaaagaactttcatttgcgcccacgggatctcatttcgaacattaacgtgatcgtgcttgaactgaaggggtctgagactacgtttatgtgcgaatacgcggacgaaacggcaactattgtggaatttctgaatagatggataactttttgtcaaagcatcatttcgaccttgact

SEQ ID NO: 33371 - DNA, 459 bp, synthetic construct
  misc_feature 1..459: note = Description of Artificial Sequence: Synthetic coding sequence
  source 1..459: mol_type = other DNA
atgtataggatgcagctcctgtcgtgtatcgcattgtctctggcgttagtaaccaattccgcccccactagctcctccaccaaaaagacccagctccaacttgaacaccttctgcttgacctgcaaatgatcctgaatgggataaacaattacaaaaacccaaaactaactaggatgttgacctttaagttctacatgcctaagaaggctactgaactcaaacacctgcagtgcctggaggaggaactcaagccactcgaggaagtgctcaacctagcacagtcaaaaaatttccatcttcggccacgtgacctgatctcaaacataaacgtaatcgtgctggaactcaaaggttctgagaccacttttatgtgcgaatacgctgatgaaactgctactattgtagagtttttaaaccgatggatcaccttttgccagtctattatatccaccctgacc

SEQ ID NO: 33372 - DNA, 459 bp, synthetic construct
  misc_feature 1..459: note = Description of Artificial Sequence: Synthetic coding sequence
  source 1..459: mol_type = other DNA
atgtaccggatgcagttgctcagctgcatcgcactgtctctggcactggtgaccaacagtgcccccacgtcgagcagtactaagaagactcagctgcagttagagcaccttttactggatcttcaaatgattcttaatggaatcaataactacaaaaaccctaagctgacgcgcatgctgacttttaagttctacatgcctaaaaaggccaccgaactgaagcatttgcagtgtctggaggaggagctgaagcctttagaggaggtgctgaacctggcccagagcaaaaattttcatctacgcccccgcgatctgataagcaatattaatgtgatcgtgctggagttgaagggcagcgagaccacctttatgtgtgagtacgcggatgagacggcaaccattgttgagttcctgaatcggtggataaccttttgccaatcgatcatatctactctaacc

SEQ ID NO: 33373 - DNA, 459 bp, synthetic construct
  misc_feature 1..459: note = Description of Artificial Sequence: Synthetic coding sequence
  source 1..459: mol_type = other DNA
atgtacagaatgcagctgctgtcttgcattgccctgagcctcgctctggtcaccaatagcgcccccacatcctcaagtacaaagaaaacacaactccagctggaacacctgctgctggatcttcagatgatacttaacgggatcaacaactataagaatcctaaacttacccggatgttgacatttaagttttacatgccaaagaaggctacagaactgaaacacctgcagtgcctggaggaagagttgaagccactggaggaggttctgaacttggcccagagcaagaatttccacctgcgacccagagacctcatttcaaacatcaatgtcattgtcctggagctgaagggcagtgagacaacgttcatgtgcgagtatgcagatgagaccgccaccatcgtggagttcctcaataggtggattaccttctgccagagtattataagcacattgacc

SEQ ID NO: 33374 - DNA, 459 bp, synthetic construct
  misc_feature 1..459: note = Description of Artificial Sequence: Synthetic coding sequence
  source 1..459: mol_type = other DNA
atgtaccgcatgcagttgctttcttgtatcgcgctgtctctcgccctggtgacaaatagcgcccctacatcaagcagcactaaaaagacgcaattacaattggagcacttactgttggacctgcagatgatcctgaacggcataaataactacaaaaaccctaagctgacccgtatgttaaccttcaaattttacatgcctaagaaagctacagaactgaaacacttgcagtgccttgaagaagaactcaagccgttagaagaagtgttaaacttggcccaaagcaagaacttccacttgaggccacgcgacttaataagtaacattaatgtgattgtgctggagctgaagggctccgagactactttcatgtgcgagtatgctgacgaaactgctaccatagtggagttcctcaaccgctggatcaccttttgccaatccatcataagcactcttaca

SEQ ID NO: 33375 - DNA, 459 bp, synthetic construct
  misc_feature 1..459: note = Description of Artificial Sequence: Synthetic coding sequence
  source 1..459: mol_type = other DNA
atgtaccgaatgcaactgctctcctgcatcgctctcagtctagcccttgtgacaaactccgcaccgacttcttcaagtaccaaaaagacacagcttcagctggagcaccttttacttgatctccagatgatccttaacggaataaacaactataaaaatcctaagctgacgcggatgctgacctttaagttttatatgccaaagaaagcaacagaacttaaacacctgcagtgcctagaagaggagctgaagccactggaagaggtcttaaacctggctcagtccaagaactttcatctgcgtcccagggatctcatctcaaatattaatgttatcgtgctagagttgaaagggtctgagactacatttatgtgtgagtatgctgacgagaccgcaacgatagttgaattcttgaatcgatggattactttttgccaaagcatcatctccacactgacg

SEQ ID NO: 33376 - DNA, 459 bp, synthetic construct
  misc_feature 1..459: note = Description of Artificial Sequence: Synthetic coding sequence
  source 1..459: mol_type = other DNA
atgtaccgcatgcagttgttgtcgtgcattgcactctcgctggcgctggtgaccaactctgccccgacgtcgtcatcaaccaaaaagactcagctgcagcttgaacatctcctgctggatctgcagatgattcttaacggaatcaacaactacaagaacccgaaactgactcggatgctgactttcaaattctatatgccgaagaaggctaccgaactcaagcacctgcaatgcctcgaagaggaactcaaaccactggaggaggtcctgaacttggcgcagagtaagaactttcatctgcggccgcgcgatctcatctcgaatatcaacgtgattgtgctcgaactcaaagggtcagaaaccaccttcatgtgtgaatacgccgacgagactgcaactatcgtggagttcctgaatcgctggatcaccttctgccagtcaattatctccaccctgacg

SEQ ID NO: 33377 - DNA, 459 bp, synthetic construct
  misc_feature 1..459: note = Description of Artificial Sequence: Synthetic coding sequence
  source 1..459: mol_type = other DNA
atgtatcggatgcagctgcttagctgcatcgctctgagcttggctctcgtgaccaactctgcccctacaagctctagcacaaagaaaactcagctccaactggaacacttgctgctcgacctgcagatgattctcaatgggattaacaactacaagaacccaaagctgactcgcatgctcaccttcaaattttacatgccaaagaaagccacggagctgaaacatctccagtgtctggaagaggaactgaaaccgttggaagaggtgcttaaccttgcccagtctaagaactttcacctccggcctcgcgatctgatcagtaacattaacgtgattgtgctggagttgaagggcagcgagactactttcatgtgtgaatatgccgatgaaaccgccaccattgtggaattcctcaatcgctggatcactttttgtcagagcattatttccaccctgaca

SEQ ID NO: 33378 - DNA, 459 bp, synthetic construct
  misc_feature 1..459: note = Description of Artificial Sequence: Synthetic coding sequence
  source 1..459: mol_type = other DNA
atgtacagaatgcagctgttgtcttgcatagcactcagtctggctctggtcactaattccgcacccacgtcttcctccacgaagaagacacagctgcagctagagcacctgctgcttgatctgcaaatgatcttaaacgggattaacaattataaaaaccctaagttaaccaggatgcttacatttaagttttacatgccaaagaaggctaccgaattaaagcacctccaatgcctggaagaagagttgaagcctcttgaggaggtgctgaacttggctcagagcaagaactttcacctgcgacctcgtgacttgattagtaacattaatgtcattgtgcttgagcttaagggcagtgagaccacattcatgtgtgagtacgctgatgagacggccactatcgtggaattcctgaatcgatggataaccttctgtcaaagtataatctccacactcact

SEQ ID NO: 33379 - DNA, 459 bp, synthetic construct
  misc_feature 1..459: note = Description of Artificial Sequence: Synthetic coding sequence
  source 1..459: mol_type = other DNA
atgtaccggatgcagctcctgagctgtattgccctgagcctcgccctggtgaccaattctgccccaacttcaagctctacaaaaaaaacacagctgcagttggagcacttactcctggatctgcagatgatcttgaacggaatcaataattacaaaaaccctaagttaactcgaatgctgacatttaagttctacatgccaaaaaaagcaactgaactgaagcatctccagtgtcttgaagaagagctgaagccactcgaggaagtcctgaacttggcacagagcaaaaattttcacctgagaccccgcgatcttatatcaaacattaatgtgatcgtgttagaactgaaaggaagtgagaccacattcatgtgcgagtatgccgatgagaccgctaccattgttgagttcctgaatcggtggattacgttctgccagtccattatatccaccctgact

SEQ ID NO: 33380 - DNA, 459 bp, synthetic construct
  misc_feature 1..459: note = Description of Artificial Sequence: Synthetic coding sequence
  source 1..459: mol_type = other DNA
atgtatcgtatgcaattactgtcttgtatcgctctttctcttgctctagtgacaaattctgcacccacatccagctcaaccaagaaaacgcaactgcaactagaacatctgctcctggaccttcagatgattcttaacggcattaataattataaaaaccccaagctgacccggatgcttaccttcaagttttacatgcccaaaaaggctacagagttgaagcacctacagtgccttgaagaggaactaaagcctctggaagaggtactgaatctggcccaatctaagaatttccatctgaggcctagggatctgattagtaacatcaatgtgattgtactggagttaaaaggctccgagaccacctttatgtgcgagtacgcagacgaaaccgcaacaattgtcgagttcctgaatcgatggatcactttctgtcaatccatcatctccacattgaca

SEQ ID NO: 33381 - DNA, 459 bp, synthetic construct
  misc_feature 1..459: note = Description of Artificial Sequence: Synthetic coding sequence
  source 1..459: mol_type = other DNA
atgtatagaatgcagctgctctcttgcattgcactcagtttggccttagtgactaactcagccccaacttcttccagtacaaagaagactcagttacagcttgaacatttgctgctggatctacagatgattttgaatggcattaacaattataagaacccgaagctaacgcgcatgctgacttttaagttctacatgcctaagaaggccaccgaactgaagcacctccagtgcctggaggaggagctcaagccgttagaggaggtcctcaacctggcccagagcaagaacttccacctgagaccaagggacctaataagcaacataaacgttatcgtgcttgaattgaaagggagcgaaacaacgtttatgtgcgagtacgctgatgaaactgctacaatcgtcgaattcctcaatcgttggataaccttctgccagagcataatatccacattgaca

SEQ ID NO: 33382 - DNA, 459 bp, synthetic construct
  misc_feature 1..459: note = Description of Artificial Sequence: Synthetic coding sequence
  source 1..459: mol_type = other DNA
atgtacagaatgcagcttctctcctgtatcgcactgtcactagccctcgtgaccaacagcgcacctaccagctcctctactaagaaaactcagcttcagctggagcatcttctgctggacctgcaaatgattttgaatggcattaacaattacaagaaccccaagctgaccaggatgctcacattcaagttctatatgccaaaaaaagccacggagttgaagcacctgcagtgtctcgaagaagagttgaagcccctggaggaggttctgaatctggcccagtctaagaactttcacctgcggcctagggatctgatatccaatatcaacgtgattgtgctggagcttaaggggtctgaaaccactttcatgtgcgagtatgcagatgagaccgccactatcgtcgagttcctgaatcgctggatcacgttctgccaatctatcatctcaacgcttact

SEQ ID NO: 33383 - DNA, 459 bp, synthetic construct
  misc_feature 1..459: note = Description of Artificial Sequence: Synthetic coding sequence
  source 1..459: mol_type = other DNA
atgtacaggatgcaacttctgtcgtgtattgcacttagcctcgccctcgtgacgaattcggcccccacttcatcctctactaaaaagacccaactgcaacttgaacaccttttgcttgaccttcagatgatcctgaatggaatcaacaactacaaaaatccgaaactgactagaatgctcaccttcaagttttacatgcccaagaaggctaccgaactgaagcatttgcaatgtctggaagaggaattgaagcctctggaagaagtgctgaacctggcccagagcaagaacttccatttgaggcctcgagatctcatatcaaacattaatgtcattgtgttggagcttaaagggtccgaaactacttttatgtgcgagtatgcagatgaaacggcgacgattgtcgaatttctgaaccgttggataaccttttgtcagtcgatcattagcaccttgacc

SEQ ID NO: 33384 - DNA, 459 bp, synthetic construct
  misc_feature 1..459: note = Description of Artificial Sequence: Synthetic coding sequence
  source 1..459: mol_type = other DNA
atgtacagaatgcaattgttgtcatgcattgccctttcgctggcccttgtgactaattcggcgccaacttccagttcgaccaagaaaacccagctccaactggagcacctgttgctggacctgcagatgatcctgaacggaatcaacaattacaagaacccgaagctcaccaggatgttgacgttcaagttctatatgcccaagaaggccacggaactgaagcatctccagtgcctcgaagaggagctgaaaccccttgaagaagtgctgaatctcgctcagtcaaagaactttcatctcagaccacgggatctgatctccaacattaacgtcatcgttttggaattgaaaggttcggaaaccaccttcatgtgtgagtacgcggacgaaactgcaactatcgtggagttccttaaccggtggatcacgttctgccagtccatcatttcgaccctgact

SEQ ID NO: 33385 - DNA, 459 bp, synthetic construct
  misc_feature 1..459: note = Description of Artificial Sequence: Synthetic coding sequence
  source 1..459: mol_type = other DNA
atgtacagaatgcagctcctgtcatgcattgcgctttcacttgctctggttactaatagcgcgcctacctcttcatcaactaaaaagacccaactgcaactggagcatctgcttctcgatttgcaaatgatattgaatggcataaacaactataagaaccctaaactgaccaggatgttgacgtttaagttttacatgccgaagaaggcaactgaactcaaacaccttcaatgcctcgaagaggagcttaagcctctcgaagaagtgcttaacctcgcacagtcgaaaaacttccatttgcggccgagagatctgataagtaacattaacgtgatcgtgctggaacttaagggttccgaaaccacttttatgtgtgagtacgcagacgagactgcaactatcgtggagttccttaaccgctggatcactttttgtcagagcattatcagcactcttacg

SEQ ID NO: 33386 - DNA, 459 bp, synthetic construct
  misc_feature 1..459: note = Description of Artificial Sequence: Synthetic coding sequence
  source 1..459: mol_type = other DNA
atgtaccgcatgcaattgctttcctgtatagcactctctttggcattggtgacgaatagcgcccctactagctctagtactaaaaagacgcaacttcaacttgaacatctgctgcttgatctccagatgattctgaatggaatcaacaactacaagaatccaaagctgaccagaatgcttacgtttaagttctacatgcccaaaaaggccaccgaactgaaacatcttcaatgcctcgaagaggaacttaagcctctcgaagaggtgcttaacttggcacagtcaaagaattttcacctgcgaccaagggatcttatttcgaacatcaacgtgattgtcttggagcttaagggttccgaaaccaccttcatgtgtgagtatgctgacgaaaccgcaaccattgtggagtttctcaaccgctggattactttttgtcagtcaataatcagcacgctgact

SEQ ID NO: 33387 - DNA, 459 bp, synthetic construct
  misc_feature 1..459: note = Description of Artificial Sequence: Synthetic coding sequence
  source 1..459: mol_type = other DNA
atgtaccggatgcagcttctgtcatgtattgctctttcccttgcccttgtgactaattcagcacctacgtcgtcctcaactaagaaaactcaactgcagctggagcatcttctgctcgaccttcagatgattcttaacggtattaacaattacaagaaccctaaattgactagaatgctcaccttcaagttctatatgcccaagaaagcgactgaactgaagcaccttcaatgccttgaggaagagctgaagccattggaagaagtattgaatctggcccaaagcaagaactttcatcttcggcccagggatctcatctccaacattaacgttatcgtccttgaactcaagggatcggaaaccaccttcatgtgtgaatacgcagatgaaaccgcaaccatagtggagttcttgaatagatggataacgttttgccagtctattatctcgactcttacc

SEQ ID NO: 33388 - DNA, 459 bp, synthetic construct; identical to SEQ ID NO: 33326
  misc_feature 1..459: note = Description of Artificial Sequence: Synthetic coding sequence
  source 1..459: mol_type = other DNA

SEQ ID NO: 33389 - DNA, 459 bp, synthetic construct
  misc_feature 1..459: note = Description of Artificial Sequence: Synthetic coding sequence
  source 1..459: mol_type = other DNA
atgtatcgcatgcagctgctttcctgtatcgcgctgtcgcttgcactggtgacgaattcggccccgacttcgtcctcgactaagaaaactcaattgcagctggaacatctcctgcttgacctgcaaatgatcctgaacggaatcaacaattacaagaaccccaagctgacccgcatgcttaccttcaagttctacatgccaaagaaagccactgagttgaaacatctgcagtgcctcgaggaagagctgaaacctttggaggaagtgcttaacctcgcacagtcaaaaaacttccacctgaggccgagagatctgatctcgaatatcaacgtgatcgtccttgagcttaagggctccgaaaccacctttatgtgcgagtacgctgatgaaaccgcgactatagtggagttcctgaaccgatggatcactttctgccagtcgatcattagcaccctgacc

SEQ ID NO: 33390 - DNA, 459 bp, synthetic construct
  misc_feature 1..459: note = Description of Artificial Sequence: Synthetic coding sequence
  source 1..459: mol_type = other DNA
atgtatagaatgcaactgctgtcatgcatcgccctttctctcgctctcgtcacaaatagcgcacctacatctagtagtaccaaaaaaacccagctgcaacttgagcacttgctgttggacctccaaatgattctgaacggaattaataactacaagaatcccaaactcactcggatgctgacatttaaattttacatgcctaagaaagctaccgagcttaaacatctgcagtgtctcgaggaggagttgaaaccacttgaagaagtgttgaatctggcacaatctaaaaacttccatctacggccaagggacctcatcagtaacattaatgtcatcgtgcttgagctgaaaggttccgagaccacttttatgtgcgagtacgcagatgaaaccgccacaatcgtggagtttcttaacagatggatcacgttctgccagagcatcatttcaaccctgacc

SEQ ID NO: 33391 - DNA, 459 bp, synthetic construct
  misc_feature 1..459: note = Description of Artificial Sequence: Synthetic coding sequence
  source 1..459: mol_type = other DNA
atgtaccgtatgcaactccttagctgcatagctttatctctggctctggttacgaactcagcccccacctcgagcagcacgaaaaagacacagctacaattagagcatttgctgcttgatctgcaaatgatcttaaacggaattaacaattacaagaatcccaaactcacacggatgctgactttcaagttttatatgcctaagaaagctactgaactcaaacaccttcagtgcttggaggaagagctcaagcccctcgaggaagtcctaaaccttgcacagtccaaaaactttcacctgcgccccagggacctgatctcgaatatcaatgtgattgtcttagagctgaagggcagcgaaacaacctttatgtgtgaatatgctgacgaaactgccactattgtggaatttctgaaccgttggataaccttttgccagagcattatatctactctgacc

SEQ ID NO: 33392 - DNA, 459 bp, synthetic construct
  misc_feature 1..459: note = Description of Artificial Sequence: Synthetic coding sequence
  source 1..459: mol_type = other DNA
atgtatcgcatgcaactgctctcgtgcatcgcgctctcgctggccctggtgactaattccgctccgacttcgtctagcaccaagaaaacccagctccagttggagcatctgcttctggatctccaaatgatcctcaacggaataaacaactacaaaaatccgaagctcactcgcatgctcaccttcaagttctacatgccaaagaaagcaaccgaactcaagcacctgcaatgcctggaggaagaactgaagccgctggaagaagtccttaaccttgcacagtccaaaaacttccatctcaggcctcgcgacctcatctccaacatcaatgtcatcgtcctggagctgaagggttccgagacgactttcatgtgtgaatacgcggacgagacggctaccattgtggagttccttaaccgctggatcaccttctgccaatcaatcatctccactctgacc

SEQ ID NO: 33393 - DNA, 459 bp, synthetic construct
  misc_feature 1..459: note = Description of Artificial Sequence: Synthetic coding sequence
  source 1..459: mol_type = other DNA
atgtaccgtatgcagctgctgagctgtatcgctttatccctggcattagtgaccaatagcgcgcccaccagtagctctacgaaaaagacccagctgcagctggaacatctgctgttggatctccagatgatactgaatgggattaataactacaaaaatccgaagttgacccgcatgttaacttttaagttctatatgccgaaaaaggccacggagctcaagcacctccagtgcctggaggaggaactgaaaccgttggaggaagtacttaatctcgctcaaagcaaaaacttccacctcagacctagggatctcatctctaatattaatgttattgtgctcgaactgaagggaagtgagaccacctttatgtgcgaatatgctgacgaaaccgcgacgatcgtggaatttctgaatcgctggattactttttgtcagtccataatatcaaccttaaca

SEQ ID NO: 33394 - DNA, 459 bp, synthetic construct
  misc_feature 1..459: note = Description of Artificial Sequence: Synthetic coding sequence
  source 1..459: mol_type = other DNA
atgtatcgtatgcagctcctaagctgcatagctctttcattagccttggtgacaaatagcgcccctacgtcctcctcaacaaaaaagacccaactacagctggagcatctactgttagatttgcagatgatacttaatggaatcaataattacaaaaatcccaagctcacccgtatgttaacattcaagttctatatgcccaaaaaagctaccgaattaaagcaccttcaatgtctagaagaggaactcaagcccttggaagaagttcttaacctggctcaatctaaaaactttcacttaaggccgagagatctaatctctaatataaatgtgattgtgttagagctaaaggggagtgagacaacttttatgtgtgagtatgctgacgaaactgcaaccattgtcgagtttctcaacaggtggatcactttctgccaatcaattatcagcaccttaacc

SEQ ID NO: 33395 - DNA, 459 bp, synthetic construct
  misc_feature 1..459: note = Description of Artificial Sequence: Synthetic coding sequence
  source 1..459: mol_type = other DNA
atgtacaggatgcagctgcttagctgcatcgctctgagtctcgcccttgtaacaaactccgctcccacatcaagcagtaccaagaaaactcagctgcaattggagcacctgctgctcgacctccagatgattttgaacggaattaacaattacaagaatccaaaattaaccaggatgttaacgttcaagttttatatgccaaagaaagctaccgagctgaaacacctgcagtgcttagaggaggaattaaagcctctggaggaagtgctgaacctggcgcaaagcaagaactttcatctaaggccccgagatctaatctcgaacatcaacgtgattgtgctggagttgaaagggtccgaaaccaccttcatgtgcgagtacgccgatgagaccgccaccatcgtcgaattcctgaaccgctggatcaccttttgccagtcaatcatctcaaccctgact

SEQ ID NO: 33396 - DNA, 459 bp, synthetic construct
  misc_feature 1..459: note = Description of Artificial Sequence: Synthetic coding sequence
  source 1..459: mol_type = other DNA
atgtacaggatgcagttactttcctgtatcgctctgtccctggcactggtgaccaattcggccccaactagcagttcaaccaaaaaaactcaactacagctggaacacctgttgcttgacttgcaaatgattctgaatggcatcaataactacaaaaatcccaaattgaccaggatgctgacattcaagttctatatgcccaaaaaggccactgagttgaagcacttgcaatgcctcgaggaagagctgaagcccttggaggaggttctgaatctggcgcagagtaagaatttccacctaaggcctagggatctgatcagcaatattaatgtcatagtgctggaactcaagggatccgaaaccactttcatgtgtgaatatgctgatgagaccgcaactatcgttgagttccttaacagatggatcacattctgtcagagcataattagcacactgacc

SEQ ID NO: 33397 - DNA, 459 bp, synthetic construct
  misc_feature 1..459: note = Description of Artificial Sequence: Synthetic coding sequence
  source 1..459: mol_type = other DNA
atgtaccgaatgcagcttcttagctgcattgccctgagtctggctctggtgacaaactctgccccgacaagtagtagtacaaagaaaacacaactgcagctggagcacctgttactcgacttacagatgattttgaatggcattaacaattacaagaatccaaaattaactagaatgctaacatttaagttttacatgccaaagaaggctactgagctgaagcacctgcagtgcttagaggaggaactgaagccactagaggaggtgttaaacctagcccagtctaaaaattttcacctgaggcctagagatttaatttctaacattaacgtcattgtgctcgaactaaagggctccgagacaacctttatgtgcgaatacgccgatgaaactgctactatcgtggagtttctcaacaggtggatcaccttttgccaatctattatttcaacattgacg

SEQ ID NO: 33398 - DNA, 459 bp, synthetic construct
  misc_feature 1..459: note = Description of Artificial Sequence: Synthetic coding sequence
  source 1..459: mol_type = other DNA
atgtaccgcatgcaacttctgtcgtgtatcgcgctttccctggccctggttaccaactcagcaccaacgtcgagcagcactaagaaaactcaattgcagcttgagcacctccttctggacctgcagatgattcttaatggtataaacaattacaaaaacccaaaactgacgcgcatgttgacctttaagttctacatgccgaagaaggctaccgagcttaaacatcttcagtgcctggaagaggaactgaaacccctggaagaagtcctcaacctcgcccagagcaagaatttccaccttcgccctcgcgatcttatctccaacatcaatgtgattgtgctggaattgaagggctcagaaacgacttttatgtgtgaatatgctgatgagactgcgaccatagtcgaattccttaatagatggatcaccttttgtcaatccattatctccacccttact

SEQ ID NO: 33399 - DNA, 459 bp, synthetic construct
  misc_feature 1..459: note = Description of Artificial Sequence: Synthetic coding sequence
  source 1..459: mol_type = other DNA
atgtaccgaatgcaactcctgtcctgcattgcactgtcccttgcattggtcactaactccgctccgacgtcatcctcaaccaaaaagacccagttgcagttggaacacctcctgctggatctgcaaatgatccttaacggaatcaacaattacaagaacccgaaactgaccagaatgctgaccttcaagttctacatgcctaagaaagccactgagctcaagcatctgcagtgcctggaggaagaacttaagccactcgaggaggtgcttaacctggctcagtcaaaaaacttccatctccgcccaagggacctgatctccaatatcaacgtgattgtgctggagctcaaaggatctgaaacgacgtttatgtgtgaatacgccgatgagactgccaccatcgtggaattcctgaaccgctggatcactttctgtcaatccatcatctcgactctgacc

SEQ ID NO: 33400 - DNA, 459 bp, synthetic construct
  misc_feature 1..459: note = Description of Artificial Sequence: Synthetic coding sequence
  source 1..459: mol_type = other DNA
atgtaccggatgcagctgctgtcttgtatcgccctttcgctggctttggtcaccaactccgcgcccactagctcaagcacgaagaaaacccaacttcaactggaacatctgttgctggatctgcagatgatcctgaatggaatcaataactacaagaacccaaagctcactaggatgctcacttttaagttttacatgccgaaaaaggctaccgaattgaagcacctgcaatgccttgaagaggagctgaaaccgctcgaggaggtcctcaatttggcacagtcgaaaaacttccacctgcgtccacgagatctgatctccaacatcaatgtgatagtgctcgaactgaagggcagtgaaactactttcatgtgcgaatatgccgacgagactgccaccattgtggaattcctgaaccgctggatcacgttctgccagtctatcatttcgaccctgacc

SEQ ID NO: 33401 - DNA, 459 bp, synthetic construct; identical to SEQ ID NO: 33375
  misc_feature 1..459: note = Description of Artificial Sequence: Synthetic coding sequence
  source 1..459: mol_type = other DNA

SEQ ID NO: 33402 - DNA, 459 bp, synthetic construct
  misc_feature 1..459: note = Description of Artificial Sequence: Synthetic coding sequence
  source 1..459: mol_type = other DNA
atgtacagaatgcagctcctctcatgtattgctctttctcttgctctggtgaccaacagcgctcctacctcgtcgagcaccaagaaaacgcaattgcagcttgaacatctccttttggatcttcagatgatcctcaatggtattaacaactacaaaaatccgaagttgacgcggatgctgaccttcaagttttacatgcccaagaaagcgaccgagcttaaacacctgcaatgtctcgaagaggaactcaagccccttgaagaggtcctgaacctggcacaaagcaagaactttcacttgaggccacgcgatcttatttccaacattaacgtgatcgtgctggagctgaagggctcagaaacgacgttcatgtgcgaatatgccgacgaaacggcaaccatcgtcgaatttctgaatcgttggattactttctgtcagagcatcatatcgactcttacc

SEQ ID NO: 33403 - DNA, 459 bp, synthetic construct
  misc_feature 1..459: note = Description of Artificial Sequence: Synthetic coding sequence
  source 1..459: mol_type = other DNA
atgtaccgcatgcaactcttgagttgcatcgccttgagcctcgcgctggtgactaactccgcccctacttcgagctccaccaaaaagacccagctccagcttgagcacctcctgcttgacctccagatgatcctgaacggaatcaacaattacaaaaacccgaagttgacgagaatgctgaccttcaagttctacatgccaaagaaagcgaccgaactgaagcatttgcaatgtctcgaggaggaattgaaaccattggaggaagtgcttaatctcgcccagtcgaagaatttccacctcagaccccgcgacctcatctcgaatatcaacgttattgtcctggaattgaagggctccgaaaccacctttatgtgcgaatatgcagatgaaaccgccaccattgtggagtttttgaacaggtggatcaccttctgtcagagcatcatcagcactctcacc

SEQ ID NO: 33404 - DNA, 459 bp, synthetic construct
  misc_feature 1..459: note = Description of Artificial Sequence: Synthetic coding sequence
  source 1..459: mol_type = other DNA
atgtatcggatgcaactgctctcatgcatagctctctcactggcactggtcactaactcagccccgacgtcctcgtctaccaaaaaaacacagctacagctagagcacctactattggacctgcagatgatccttaacggaatcaataactataaaaaccctaaactgacacgtatgctcacattcaaattctatatgcctaaaaaggccaccgagttgaaacatctgcagtgtcttgaggaggaactaaagcctctggaggaggtgctgaatctggcgcaatccaagaattttcacctgcgcccgcgcgacctgatcagcaacataaatgtgattgtgctggagctcaagggatcagagactactttcatgtgcgaatacgccgatgagactgcaacaatagtagaattcctgaaccgatggataaccttctgccaaagtattattagtacactgacg

SEQ ID NO: 33405 - DNA, 459 bp, synthetic construct
  misc_feature 1..459: note = Description of Artificial Sequence: Synthetic coding sequence
  source 1..459: mol_type = other DNA
atgtacaggatgcaacttcttagctgtatcgctctttctcttgcactggtcaccaattccgctccgacgtcgtcctcgactaagaaaactcaactgcaacttgagcaccttcttctcgatcttcaaatgatccttaacgggattaacaactacaagaatccaaagctgacgagaatgctgacctttaagttttacatgcctaagaaggcgactgaactcaagcacctgcaatgtctggaggaagaattgaaaccactcgaagaggttcttaatctggcacaatccaaaaacttccatcttcgcccacgtgatctcatctcgaacataaacgtgattgtgctggagcttaaaggatcagaaaccacctttatgtgcgaatacgccgacgaaaccgccacgattgtggagttcctgaatcgttggatcaccttctgccaaagcattatcagcactctgacg

SEQ ID NO: 33406 - DNA, 459 bp, synthetic construct
  misc_feature 1..459: note = Description of Artificial Sequence: Synthetic coding sequence
  source 1..459: mol_type = other DNA
atgtacaggatgcagctgctttcctgcatcgctctgagcctggccctggtcactaattccgcgccgacctcgtcgtcaactaaaaagactcagctgcaactggaacacttgctcctggatctgcagatgatcctcaacggcattaacaattacaagaacccaaagctcactagaatgttgacgtttaagttctatatgccaaagaaggcaactgagctgaagcacctgcagtgcctcgaggaggaactcaagccgctggaagaagtgttgaatctggcacaatcgaagaacttccatctgcggcctagagatctcatctcaaacatcaacgtgatcgtcctggagctgaagggttcggaaaccacgtttatgtgcgagtatgcagatgaaacggcaaccatcgtggaatttctcaaccggtggatcaccttctgtcagtccatcattagcactctgacc

SEQ ID NO: 33407 - DNA, 459 bp, synthetic construct
  misc_feature 1..459: note = Description of Artificial Sequence: Synthetic coding sequence
  source 1..459: mol_type = other DNA
atgtatcgcatgcagcttctttcctgcattgcattatcgttagcgttggttactaatagcgcaccaacgagcagttccaccaagaaaacccagctccagcttgaacacctcttgttggaccttcaaatgatccttaatgggatcaataattataaaaaccccaaactcacacgaatgctgacgtttaagttttatatgcccaaaaaagcaaccgaacttaaacaccttcagtgcctagaggaggagctcaagcctctggaagaggtgctgaatctggcccagagtaagaactttcatctgagacctagggatttaatctccaacattaatgtgattgtgcttgaactaaagggcagcgagactacctttatgtgtgagtacgctgacgagaccgccacaatcgtggaattcttgaatcgttggatcactttctgtcagagcattattagcacgttgacg

SEQ ID NO: 33408 - DNA, 459 bp, synthetic construct
  misc_feature 1..459: note = Description of Artificial Sequence: Synthetic coding sequence
  source 1..459: mol_type = other DNA
atgtatcgaatgcaattactatcgtgtatagcgttatcgctagcgttagtaacgaattcggcgccgacgtcgtcgtcgacgaaaaaaacgcaactacaactagaacatctattattagatctacaaatgatactaaatggtataaataattataaaaatccgaaactaacgcgtatgctaacgtttaaattttatatgccgaaaaaagcgacggaattaaaacatttacaatgtttagaagaagaattaaaaccgctagaagaagtactaaatttagcgcaatcgaaaaattttcatttacgaccgcgtgatctaatatcgaatataaatgtaatagtactagaattaaaaggttcggaaacgacgtttatgtgtgaatatgcggatgaaacggcgacgatagtagaatttttaaatcgttggataacgttttgtcaatcgataatatcgacgctaacg

SEQ ID NO: 33409 - DNA, 459 bp, synthetic construct
  misc_feature 1..459: note = Description of Artificial Sequence: Synthetic coding sequence
  source 1..459: mol_type = other DNA
atgtacaggatgcaacttctttcgtgcattgcactgtcgctcgctcttgtcacgaattcagcccccacctcgtcgtcaacgaaaaagactcagctgcaactcgagcacttgctgcttgatctgcaaatgatacttaatggaatcaacaactacaagaatcctaaactgacccgaatgctgaccttcaagttctacatgccaaagaaggccactgagctcaagcatctgcagtgcctggaagaagaactgaagccacttgaggaagtcctgaacctggcacaaagcaagaattttcatctgcgccctcgcgatctcatttccaacataaatgttatcgtgcttgagctgaagggcagcgagactacctttatgtgtgaatacgcagatgaaacggcaaccatcgtggagttcctcaacaggtggattacgttttgtcagtctattatctcgaccttgact

SEQ ID NO: 33410 - DNA, 459 bp, synthetic construct
  misc_feature 1..459: note = Description of Artificial Sequence: Synthetic coding sequence
  source 1..459: mol_type = other DNA
atgtacaggatgcaactccttagctgtatagccctttcgcttgccttggtcacgaacagcgcaccgaccagctcctcaactaaaaagacccagcttcaactcgaacatttgcttctggatttgcagatgattcttaacgggatcaataactacaaaaaccctaagctgactagaatgttgacttttaagttttacatgccaaagaaagcgactgaactgaagcacctgcagtgcttggaagaggaactgaagcctctcgaggaagtcctgaaccttgcgcaatcgaagaattttcacctcagaccgcgtgacctcatctcgaacattaatgtgatcgtgctggaactgaagggatccgagactacttttatgtgtgagtatgcagatgaaaccgcaaccatcgtggaattcctcaatcgctggattaccttctgccaatccattatctccaccttgacg

SEQ ID NO: 33411 - DNA, 459 bp, synthetic construct
  misc_feature 1..459: note = Description of Artificial Sequence: Synthetic coding sequence
  source 1..459: mol_type = other DNA
atgtaccgcatgcagttgctcagctgcatcgccctttcactggcactggtgactaactccgcgcctactagctccagcacgaagaaaactcagttgcagctcgaacacctcctcctcgacctccaaatgattctgaacggaattaacaactacaaaaacccaaagctcacgcggatgttgaccttcaagttttacatgccgaaaaaggcaaccgaactgaagcatctgcaatgcttggaagaagaactgaagccgcttgaggaggtgctgaacctggcacagtcgaagaattttcacctgcggccacgtgatctgatctcaaacatcaatgtgatcgtcctcgagctcaagggaagcgaaaccaccttcatgtgcgaatacgcagacgagacggccaccatagttgagtttctgaaccgatggatcactttctgccagtccattatctcgactctgacc

SEQ ID NO: 33412 - DNA, 459 bp, synthetic construct
  misc_feature 1..459: note = Description of Artificial Sequence: Synthetic coding sequence
  source 1..459: mol_type = other DNA
atgtacagaatgcagttgctgtcctgtatcgcattgtcactggctctcgtgaccaacagcgccccgacgtcctcctccaccaaaaagacgcagctgcaattggagcacctcctgcttgacctgcagatgattctgaatgggatcaacaactacaagaatcctaaactgaccagaatgcttaccttcaaattctacatgcccaaaaaggcgactgaactcaagcaccttcagtgtctggaggaagaactcaagccgctggaagaagtgctgaaccttgcgcagtcaaagaactttcacctgcgcccacgggacctcatctcgaacatcaatgtcatcgtcctggaactgaagggatcagagactactttcatgtgcgaatacgccgatgaaactgccaccatcgtggagtttctgaatcggtggatcaccttttgccagtcgattatctcgacccttacg

SEQ ID NO: 33413 - DNA, 459 bp, synthetic construct
  misc_feature 1..459: note = Description of Artificial Sequence: Synthetic coding sequence
  source 1..459: mol_type = other DNA
atgtacagaatgcaattgctttcctgtatagcactctctttggccctggtgaccaactcagcgcctacttcatcctctactaagaagacacagctacaactggagcacctgttgctcgacttgcagatgatcctgaatggcattaacaactacaaaaatcctaaattgacgagaatgctgaccttcaaattctacatgcctaagaaggctacagagttaaaacatttgcagtgccttgaggaggagttaaagcctctggaggaggtgctgaatctggcccagtctaagaactttcacctcagaccgcgtgacctgatttcaaacataaatgtaatagttctggagctgaagggcagtgagaccacattcatgtgtgagtacgcagacgagacagctaccatcgtggagtttctgaaccgttggattaccttttgtcagagcattatatctacactgacg

SEQ ID NO: 33414 - DNA, 459 bp, synthetic construct
  misc_feature 1..459: note = Description of Artificial Sequence: Synthetic coding sequence
  source 1..459: mol_type = other DNA
atgtatcgcatgcaacttctatcttgcatagccctgagtttggccctggtgacaaacagcgccccaacctctagttccactaaaaagacacaactccagttggagcatctcttacttgacctgcagatgattttgaatggtatcaataactacaaaaaccctaaacttacaaggatgctgacctttaaattttatatgcccaagaaggctacggaattaaagcacctgcagtgcctcgaggaggagctgaaacctctcgaggaggtcctgaatctggcccagtctaaaaattttcatctcaggccccgcgacctgatttctaacattaacgtgatcgtgctggagctgaaaggaagcgaaacaaccttcatgtgtgagtatgctgacgaaacagcgacaatagtggagttcctcaacagatggataacattttgtcagtccatcatttctacattgaca

SEQ ID NO: 33415 - DNA, 459 bp, synthetic construct
  misc_feature 1..459: note = Description of Artificial Sequence: Synthetic coding sequence
  source 1..459: mol_type = other DNA
atgtaccgtatgcaactgttgtcttgtattgccctctcccttgctctagtgactaacagcgctcctactagtagctccaccaaaaagacccagctacagttggagcacttactcctggacctccagatgattctgaatggcatcaacaattacaaaaacccaaaactgaccaggatgttgacatttaaattttatatgcccaagaaagcaacggagctgaagcatctgcagtgtttagaggaagagctgaaacctctcgaagaggtgctgaacctggcacagtctaaaaacttccacctacggccgagagatttgattagcaacatcaacgtcatagtgctcgagctaaagggcagtgagactactttcatgtgtgagtatgcagatgagaccgctacaatagttgagttccttaatcggtggataacattctgccaaagcataatctcaacactcaca

SEQ ID NO: 33416 - DNA, 459 bp, synthetic construct
  misc_feature 1..459: note = Description of Artificial Sequence: Synthetic coding sequence
  source 1..459: mol_type = other DNA
atgtaccgtatgcagctcctgtcatgcattgccctgtcgctggccctggttaccaacagcgcgcctaccagctccagcaccaaaaaaacccagctgcagctggagcacttgctcctcgacctgcagatgatcttgaacggtatcaataactacaagaatcccaagttgacgagaatgctgacatttaaattctatatgccaaagaaggcgacggagctgaagcatttgcaatgcttggaggaggagctgaagcctctggaggaggtgctgaacctggcgcaaagcaaaaatttccatctgagacctcgagacttgattagcaacattaatgtcatcgtgctggaactgaagggttccgagacaacgttcatgtgcgagtacgcggatgagaccgcaaccatcgtcgagttcctaaaccgctggatcacgttctgtcagtcaattattagcaccctgacg

SEQ ID NO: 33417 - DNA, 459 bp, synthetic construct
  misc_feature 1..459: note = Description of Artificial Sequence: Synthetic coding sequence
  source 1..459: mol_type = other DNA
atgtacaggatgcagctgctgtcctgtattgccctttcgctcgccctggtcactaattcggctcccacgtcctcctccaccaaaaagactcaattgcaactcgaacatctgctgctggacctccagatgatcttgaatggcatcaataactacaagaacccaaagctgacccggatgcttactttcaaattctacatgccaaagaaggccaccgagctgaaacacctccaatgcttggaggaggaactcaagcctctggaggaggtgcttaacctcgcccagtccaagaacttccacctcagacctcgcgatctgatttcaaacatcaacgtgatcgtgctcgaacttaaaggttctgaaaccacgtttatgtgcgaatacgcagacgaaaccgcgaccattgttgagtttcttaatcgctggatcactttctgccagtcaatcatctccacgctgact

SEQ ID NO: 33418 - DNA, 459 bp, synthetic construct
  misc_feature 1..459: note = Description of Artificial Sequence: Synthetic coding sequence
  source 1..459: mol_type = other DNA
atgtaccggatgcagttgctgagctgcatcgcactctccctcgcactggtgactaattcagctcctacttcgtcatcaaccaagaaaacccaactgcagctcgaacacctcctgctggatctgcagatgatcctgaacggcatcaacaattacaaaaaccctaagctgaccaggatgctgacctttaagttctacatgccgaagaaggcgacggaactcaagcatcttcagtgcctggaggaagagctcaaaccacttgaagaagtcttgaacctcgcccaatcgaaaaacttccacctgcgcccgcgagacttgattagcaacatcaatgtgattgtgcttgaactgaaggggtcggaaacgacttttatgtgtgaatacgccgatgaaaccgccaccatcgtcgagtttctgaaccggtggatcaccttctgccagtcgatcatctcgactctcacc

SEQ ID NO: 33419 - DNA, 459 bp, synthetic construct
  misc_feature 1..459: note = Description of Artificial Sequence: Synthetic coding sequence
  source 1..459: mol_type = other DNA
atgtacagaatgcaactgctgtcctgcattgctttgagtttagcacttgtgacgaattcggcgccgacctcgagcagcaccaagaagacccagctccaacttgaacatcttctgctggacctacagatgatcctgaatgggatcaataattacaagaatcccaaattgacccgcatgctgacgtttaaattctacatgccaaagaaagccacagagctgaagcatctccagtgcttagaggaggagcttaaaccgttggaagaagtgctgaatctggcacagtccaagaattttcacctgagacctcgggatctaattagcaacataaacgtgatagttttggagttgaagggcagtgaaaccacgtttatgtgcgagtatgccgacgagacagcgaccatcgtcgagtttctgaacagatggattactttctgccagagtatcatatccacactgact

SEQ ID NO: 33420 - DNA, 459 bp, synthetic construct
  misc_feature 1..459: note = Description of Artificial Sequence: Synthetic coding sequence
  source 1..459: mol_type = other DNA
atgtaccgtatgcaattgctctcttgcatcgctttgtcccttgcactggtgactaacagcgctcctacctcatcctcaaccaaaaagactcagctgcagcttgaacatctccttctggatctccagatgattttgaacggtattaacaactacaagaaccccaagctgacacgcatgctgactttcaagttctatatgcccaagaaagctactgagctcaagcacctgcagtgcctcgaagaagagttgaagcctctcgaggaggtgctgaaccttgctcagagtaagaactttcacctgaggccccgtgacttgatcagcaacatcaacgtgatcgttctcgagctgaagggtagtgagactacctttatgtgtgagtacgcagacgaaactgccacaatcgtggagttcctgaacagatggatcaccttctgtcagtcaatcatctctacattgaca

SEQ ID NO: 33421 - DNA, 459 bp, synthetic construct
  misc_feature 1..459: note = Description of Artificial Sequence: Synthetic coding sequence
  source 1..459: mol_type = other DNA
atgtaccgaatgcaactgcttagctgcatcgcgctctccctcgcgcttgtgaccaactcggcgcccacctcaagttcgaccaaaaagacccagctgcagctcgaacaccttcttctggatttgcagatgatcctcaacggcatcaataactataagaaccccaagctgacccggatgttgaccttcaaattctacatgccgaagaaggccactgaacttaagcatctccaatgtctcgaagaggaactgaaaccattggaagaggtcctgaacctcgctcagtccaagaatttccacctgcgcccgcgcgacttgatttcgaacatcaatgtgattgttcttgagctgaaggggtccgaaaccacgttcatgtgcgagtacgcagacgaaaccgccactatcgtggagttcctgaatagatggatcaccttttgccaatcgataatctcaactctgact

SEQ ID NO: 33422 - DNA, 459 bp, synthetic construct
  misc_feature 1..459: note = Description of Artificial Sequence: Synthetic coding sequence
  source 1..459: mol_type = other DNA
atgtataggatgcaacttctttcttgtattgcattaagtcttgcattagttacaaatagtgcaccaacaagttcatctactaaaaaaactcaacttcaacttgaacatcttttgttagatcttcaaatgattcttaatggaataaataactataagaatcctaaattgacacgtatgcttacatttaaattttatatgcctaaaaaggcaactgagttaaaacatcttcaatgtcttgaagaagaacttaaaccattagaagaagttttaaatttagctcaatcaaaaaatttccatcttagacctagagacttaatatctaatattaatgttattgttttagaattaaagggtagtgaaactacattcatgtgtgaatatgcagatgaaactgcaactattgtagaattcttaaatagatggataactttctgtcaatcgattatttcaaccttaaca

SEQ ID NO: 33423 - DNA, 459 bp, synthetic construct
  misc_feature 1..459: note = Description of Artificial Sequence: Synthetic coding sequence
  source 1..459: mol_type = other DNA
atgtaccgaatgcagctcctttcctgtatagcgctctcacttgccctggtcacgaacagcgcacctacctcctcctcgacgaagaaaactcaattgcagcttgagcacctgcttcttgatttgcagatgatcctcaacgggattaacaattacaaaaacccaaaacttacccggatgctcaccttcaaattctacatgccaaagaaggcaaccgaactcaagcatctgcaatgcctggaagaggaactcaagccactggaggaagtgctcaacctggcacaaagcaaaaactttcatctgcggccccgcgatctcatctccaatatcaacgtcatcgtgctggaactcaaggggtcagagactacctttatgtgtgaatacgcagacgaaaccgcaaccattgtggaattccttaaccgctggattaccttttgtcaaagcataatctcaaccctgact

SEQ ID NO: 33424 - DNA, 459 bp, synthetic construct
  misc_feature 1..459: note = Description of Artificial Sequence: Synthetic coding sequence
  source 1..459: mol_type = other DNA
atgtaccgcatgcagctgctgtcgtgtatcgcactgtctctggccctcgtgactaacagcgcccccacgtcatcctcgactaaaaagactcaactgcaactggaacacctgctgttggacctccagatgattctgaatggcatcaataactacaagaacccgaaacttaccaggatgctgacctttaagttctacatgccaaagaaagcgaccgaacttaagcatctccaatgccttgaggaggaactcaagcctctggaagaagtgctgaacttggcccagtccaagaacttccacttgcggccgcgcgatctgatctccaatatcaacgtgatcgtcctcgagctcaagggatcagaaaccacgttcatgtgcgagtacgctgacgaaaccgcgactatcgtcgagttcctcaatagatggatcactttttgccagtcgattatcagcaccctgacc

SEQ ID NO: 33425 - DNA, 459 bp, synthetic construct
  misc_feature 1..459: note = Description of Artificial Sequence: Synthetic coding sequence
  source 1..459: mol_type = other DNA
atgtacaggatgcaactcttgtcctgcatcgccctctctctggctctggttactaattcggcgccgacctcctcctccaccaagaagactcaactgcaacttgaacatctccttctggacctgcagatgatattgaacgggatcaacaattacaagaatccaaagttgacgcgcatgcttaccttcaagttttacatgccgaagaaggcgaccgaacttaaacacctgcagtgcctggaagaagagctgaagccgctcgaagaggtcctgaatctggcccagtccaaaaacttccacctgcgcccccgggacctgatctcgaatatcaatgtgattgtcttggaattgaaaggaagcgaaactactttcatgtgcgagtatgccgacgaaaccgcgaccatcgtcgaattcctcaaccgatggatcacgttctgtcagtccatcatctcaaccctcacc

SEQ ID NO: 33426 - DNA, 459 bp, synthetic construct
  misc_feature 1..459: note = Description of Artificial Sequence: Synthetic coding sequence
  source 1..459: mol_type = other DNA
atgtaccgcatgcaacttctttcgtgtattgcactgtccttggcacttgtgacgaatagcgcgcctacctcctcaagcactaaaaagacccagcttcaactggaacatctgctgttggatcttcagatgatcctgaatgggatcaacaactacaagaatccaaagctgacccgtatgctcacgttcaaattctacatgccgaagaaggccaccgagctgaagcacctgcaatgccttgaagaagaactgaagcctctggaggaagtcctcaatctggcacaatcgaaaaacttccatctgcgacccagagatcttatttccaacattaacgtgattgtactcgaactgaagggctcggaaactaccttcatgtgtgaatacgccgatgaaaccgcaactattgtggagtttctcaacagatggattactttctgtcagagcataatctctactctcacc

SEQ ID NO: 33427 - DNA, 459 bp, synthetic construct
  misc_feature 1..459: note = Description of Artificial Sequence: Synthetic coding sequence
  source 1..459: mol_type = other DNA
atgtaccgcatgcagctcctttcatgcatcgcattgtcgttggcgctggtgaccaacagcgccccgacctcaagctcgactaaaaagacccaactgcagctcgaacacctgctgctggacctccagatgatactgaacggaatcaacaactacaagaatcctaagttgactcgcatgctcacctttaagttttacatgccaaaaaaggcgaccgagcttaagcaccttcagtgcttggaagaagaactgaagcctctggaggaggtgcttaatctggcccaatccaagaatttccatctcaggccgagggatctgatctccaacatcaatgtgatcgtcctcgagctgaagggttccgagactacgtttatgtgcgagtacgcggacgaaactgccaccatcgtcgaatttctgaatcgctggatcaccttctgtcagtccatcatcagcaccttgacc

SEQ ID NO: 33428 - DNA, 459 bp, synthetic construct
  misc_feature 1..459: note = Description of Artificial Sequence: Synthetic coding sequence
  source 1..459: mol_type = other DNA
atgtaccgaatgcagcttctaagctgcattgcgctgtctctggcgcttgtcactaattcagcaccaacatcatcctccacgaaaaaaacacagctccagctagagcatctgctcttggacttacaaatgatcctgaatgggatcaacaactacaagaatcccaagctcacccggatgctgacattcaaattctacatgcctaaaaaagcaaccgagctcaaacacctgcagtgtcttgaagaagaactgaaacccctcgaggaggtactgaatttggcacagtcaaagaacttccacctgcgcccgagagacctgatcagcaatatcaacgtgatagtgctagagctcaaagggagtgaaaccacatttatgtgcgagtacgcagatgagaccgcgactatcgtggagtttctgaataggtggataacgttttgccaatctattatctccaccctgacc

SEQ ID NO: 33429 - DNA, 459 bp, synthetic construct
  misc_feature 1..459: note = Description of Artificial Sequence: Synthetic coding sequence
  source 1..459: mol_type = other DNA
atgtataggatgcagctgctgtcctgtattgccctctcactggccctggtaactaacagcgcaccaacctcaagctccactaagaagactcaactgcaactcgaacacctgttactagacctgcagatgattctcaacggcataaacaattataaaaatcccaagcttaccagaatgttgacattcaaattctacatgccaaaaaaagcaacagaactgaaacacctccagtgcctagaggaagagctgaaacccctggaggaggtactgaatctagcccagagtaagaactttcacctgcggccccgcgacctcataagtaacattaatgtgatagtcctagagctcaagggctctgagaccacattcatgtgtgagtatgccgacgaaaccgccacaattgttgagtttctgaaccgatggattacattttgccagagcatcatctcgactcttacg

SEQ ID NO: 33430 - DNA, 459 bp, synthetic construct
  misc_feature 1..459: note = Description of Artificial Sequence: Synthetic coding sequence
  source 1..459: mol_type = other DNA
atgtatcgcatgcagctgctttcctgcatagcactgtcccttgcactggtgaccaactcagcgccaacttcgtcctcaaccaaaaagacccagctccaacttgaacatctccttcttgatctgcaaatgatcctgaacggaatcaataactacaagaacccaaaactgacccggatgctgacttttaagttttacatgcctaagaaggccaccgaacttaagcacctccagtgcctggaagaagaactcaagccgctggaagaagtgcttaacctggctcagtccaaaaactttcatctcagaccccgggacttgatcagcaacataaacgtgatagttctggaactgaaaggttcagagacgacgtttatgtgcgaatacgcagatgaaaccgctacgattgtggagttcctcaaccgatggatcaccttttgtcagtcgatcattagcaccctgact

SEQ ID NO: 33431 - DNA, 459 bp, synthetic construct
  misc_feature 1..459: note = Description of Artificial Sequence: Synthetic coding sequence
  source 1..459: mol_type = other DNA
atgtaccggatgcagctgctgtcctgtatcgccctgagcctggcccttgtgaccaatagcgctccaacatcctcctcgacaaaaaaaacccaactccaactggaacacctgctcttagaccttcagatgatcttgaacggtataaataattataagaatcccaaactgactcgaatgctgacattcaaattctatatgcccaagaaggccacggagctaaaacatctgcaatgtctggaggaggagctcaagcctctggaggaggtgcttaacctcgcacagtctaaaaacttccacttgcggcccagggacctcatctccaacataaacgtcattgtgcttgagcttaagggcagtgaaacgacctttatgtgcgagtatgccgacgaaacagccacaatcgtggagttcctgaaccggtggattacattttgtcagagtattatttcaaccctgact

SEQ ID NO: 33432 - DNA, 459 bp, synthetic construct
  misc_feature 1..459: note = Description of Artificial Sequence: Synthetic coding sequence
  source 1..459: mol_type = other DNA
atgtacagaatgcagctcctgtcatgcatcgccctgtcattggcgttggtcacgaacagcgctccgactagctcctccaccaaaaagacgcaactgcagctcgagcacctcctgcttgacttgcagatgattctgaacgggatcaacaattacaagaacccgaagctgaccaggatgctcacctttaagttctatatgccgaagaaagccactgaactcaagcaccttcagtgtctggaggaagagctgaaaccgctggaggaagtcctgaatctggcgcaatccaagaattttcacctccgtccccgggacctgatttcgaacatcaatgtgatcgtgctggaactcaaaggatcagaaactacgttcatgtgtgaatacgcggatgagacggcaaccatcgtggaatttctgaacaggtggatcactttctgccaatcgatcatctcgaccctcact

SEQ ID NO: 33433 - DNA, 459 bp, synthetic construct
  misc_feature 1..459: note = Description of Artificial Sequence: Synthetic coding sequence
  source 1..459: mol_type = other DNA
atgtataggatgcagttactctcttgtatagccctgtctctggcactggtgacaaactccgctcctacaagctcatccaccaagaaaacccaactgcagctagagcatctgctcctcgatcttcagatgatcctgaatggaatcaataattataagaacccgaagttgacgcggatgttaacattcaagttctatatgcctaagaaagctacggaattgaaacatctacagtgtctggaggaagaactcaagcccctcgaggaggtgctgaatctggcccaatcaaagaatttccatttgcgaccacgagatctcatatccaacatcaatgtgatcgtgttagagctgaagggttctgaaacgacttttatgtgtgagtacgcagacgaaactgctactatcgttgaattcttaaatcgctggattaccttctgccagtctatcatcagtactttgaca

SEQ ID NO: 33434 - DNA, 459 bp, synthetic construct
  misc_feature 1..459: note = Description of Artificial Sequence: Synthetic coding sequence
  source 1..459: mol_type = other DNA
atgtatcggatgcagcttctgtcgtgcatcgcgctgtcgttggcgcttgtgaccaattcagcccccacttcctccagcactaagaaaacgcaattgcaactcgaacaccttcttctggacctccagatgatcttgaacggcatcaacaactacaagaacccgaagctgactcggatgctgacgttcaagttctacatgccaaagaaggccaccgaactgaagcacctgcagtgcttggaggaagagctgaagcctctggaggaggtcttgaatctggctcagtcgaaaaactttcatctcagacctagggatctgattagcaacattaatgtgatcgtgctggagctgaaaggatcagaaactacttttatgtgtgaatacgcagacgaaacggcaaccatcgtcgaattcctgaatcgttggattaccttctgccaatccatcatctcaaccttgacc

SEQ ID NO: 33435 - DNA, 459 bp, synthetic construct
  misc_feature 1..459: note = Description of Artificial Sequence: Synthetic coding sequence
  source 1..459: mol_type = other DNA
atgtatagaatgcagttactttcctgcattgcacttagccttgctctggtgaccaactctgcaccgacatcttcctctactaagaagacacagttacaactcgaacaccttttactggacctgcagatgattctgaacgggattaacaattacaaaaaccccaaactgacccggatgctgacgttcaagttctacatgcccaagaaggctaccgagctgaaacacttgcagtgcctggaggaagagcttaaaccactggaggaggttctcaatctggcccagagcaaaaacttccaccttagacctcgcgacttaatttcaaatatcaatgtgatcgtcttggagcttaaggggtcagaaacaacttttatgtgcgagtatgcagatgagacagccactatcgtcgaattccttaacaggtggataaccttttgccagtccatcatttccacgctgacc

SEQ ID NO: 33436 - DNA, 459 bp, synthetic construct
  misc_feature 1..459: note = Description of Artificial Sequence: Synthetic coding sequence
  source 1..459: mol_type = other DNA
atgtacaggatgcagctactaagctgcatagctctgtctctggcgcttgtcactaacagtgcacccacctctagctcgaccaagaaaactcagctgcagctcgaacacttgctgctggatcttcagatgatcctgaatgggattaacaactacaagaaccccaaactgaccaggatgctcaccttcaaattctatatgccaaagaaagccacagagttaaagcatttgcagtgtctagaggaggaactgaagcccttggaagaagtgcttaatttggcacagtccaaaaactttcacctccggcccagagatctaattagcaacattaacgtgatcgtactagaattaaagggaagtgagacaacttttatgtgcgagtacgctgacgaaaccgcaacgatcgtggaattcctgaataggtggatcaccttttgccagtccataatcagtacccttacc

SEQ ID NO: 33437 - DNA, 459 bp, synthetic construct
  misc_feature 1..459: note = Description of Artificial Sequence: Synthetic coding sequence
  source 1..459: mol_type = other DNA
atgtatagaatgcaactcctctcatgcatcgcactgtcactggcactggtgactaacagcgcgccaacttcatcgtcgaccaagaaaacccaacttcagctggagcatctccttctggatctgcagatgatcctgaatggcatcaacaactacaaaaacccgaaactgacgcggatgcttaccttcaagttctacatgccgaaaaaggccaccgaactgaaacacctgcaatgtttggaggaagaactgaagcctttggaggaagtccttaacctggcacaatccaagaatttccacctgcgtccacgcgacctcatatctaacatcaatgtcatcgtgttggaactcaagggatcggagactacgtttatgtgtgagtacgccgacgagactgctactattgtggaattcctgaatcgctggattaccttctgtcagtccatcatttcgaccctcact

SEQ ID NO: 33438 - DNA, 459 bp, synthetic construct
  misc_feature 1..459: note = Description of Artificial Sequence: Synthetic coding sequence
  source 1..459: mol_type = other DNA
atgtatcggatgcagctgcttagctgcattgccctctcattagcgttggttactaactctgcaccgacgagctctagtacaaaaaagacccagctgcagcttgaacacctgctcctggacctccagatgattttaaatggtattaataattacaagaatccaaagctgacgaggatgctgaccttcaaattctacatgcccaaaaaagccaccgagcttaaacacctacagtgtttggaagaagagttgaagcctctcgaggaggtgctcaacctggcccagtccaagaacttccacctgaggcctcgcgatctgatttctaacatcaatgttatagtgctggaattaaagggctccgaaactacctttatgtgtgagtatgccgacgaaaccgcaaccatcgtggagttcctgaatagatggatcacattttgtcagagcatcatctccacactgact

SEQ ID NO: 33439 - DNA, 459 bp, synthetic construct
  misc_feature 1..459: note = Description of Artificial Sequence: Synthetic coding sequence
  source 1..459: mol_type = other DNA
atgtacagaatgcaactgctgtcgtgtatcgcattgtcgctggcacttgtgactaattcagcaccgacttcgagctcgactaaaaagacccagcttcaattggaacatctgctgcttgaccttcagatgattttgaatgggatcaacaactacaagaacccaaagctgaccaggatgctcacttttaagttttacatgccaaagaaagcaaccgaactcaaacatctccaatgccttgaagaagaactgaagccactggaggaagtgctgaatctggcccagtcgaagaatttccatctccgtcctagggatcttatctcgaacatcaacgtcattgtgctcgagctgaaaggaagcgaaactacttttatgtgtgaatacgcagatgaaacggccaccatagtcgaattccttaaccgatggattactttttgtcagtccatcataagtactctgacc

SEQ ID NO: 33440 - DNA, 459 bp, synthetic construct
  misc_feature 1..459: note = Description of Artificial Sequence: Synthetic coding sequence
  source 1..459: mol_type = other DNA
atgtaccggatgcagctgctcagctgtattgcgctctctctcgcactcgtcactaactcggcaccaacgtcctcatctactaagaaaacccagctgcaactggagcaccttcttctcgatcttcaaatgattcttaatggtatcaataactacaagaatcctaaactgactaggatgctgacctttaagttctacatgccaaaaaaggcaacggaactgaaacatcttcaatgccttgaagaagagcttaagccgctggaggaggttcttaatctggcccagtcgaagaacttccatctgcgcccccgcgacctgattagcaacatcaacgtaattgtcttggaacttaagggatcggaaactacgtttatgtgtgaatatgcagatgaaaccgccaccatcgtggaattcttgaaccgatggataactttttgtcaatcgattatctcgaccctcacc

SEQ ID NO: 33441 - DNA, 459 bp, synthetic construct
  misc_feature 1..459: note = Description of Artificial Sequence: Synthetic coding sequence
  source 1..459: mol_type = other DNA
atgtacagaatgcaactgctcagctgcatcgcattgagcctggctttggtgaccaactccgccccgactagctcgtccactaagaaaacccagttgcaacttgagcatctgcttctggacctgcagatgatcctgaacggtatcaataactataagaacccgaagctcactcggatgctgaccttcaaattctacatgcctaaaaaggcaaccgaattgaagcacttgcagtgtctggaggaagaacttaagcccctcgaagaggtcctcaatcttgcccaatctaagaatttccacctgcggccgcgcgatcttatttccaacatcaatgtgatcgtcctggagctgaaaggatcagagactaccttcatgtgcgaatacgcggacgaaacggcgaccattgtagagttcctgaaccgctggatcaccttttgccagtccataatctcgacgctcact

SEQ ID NO: 33442 - DNA, 459 bp, synthetic construct
  misc_feature 1..459: note = Description of Artificial Sequence: Synthetic coding sequence
  source 1..459: mol_type = other DNA
atgtatcgcatgcagttgttgagttgtatagccctgagcctggcgctggtgaccaattccgctccaacatccagctccactaagaagacccagctccaactggagcacttgttgttggacttgcaaatgattctgaacggaatcaacaactacaaaaaccccaagctgaccaggatgctgactttcaagttttacatgcccaaaaaggctactgagttgaaacatttgcagtgcctggaagaagaactgaaacccctcgaagaggtcctgaacctcgcccagagcaagaattttcacttgcgcccgcgcgaccttatctctaatattaacgtaattgtgttggaactcaagggcagcgaaaccacttttatgtgcgagtacgctgacgagaccgctactatcgtggagttcctgaacagatggattactttttgtcaaagcatcatttctacactgacc

SEQ ID NO: 33443 - DNA, 459 bp, synthetic construct
  misc_feature 1..459: note = Description of Artificial Sequence: Synthetic coding sequence
  source 1..459: mol_type = other DNA
atgtaccgcatgcagctcctctcgtgcatcgctctgagtcttgccctcgttaccaactccgcacccacatcaagtagtactaaaaagactcagctgcaattagagcatctccttctggacctccagatgattctcaacggtatcaacaactacaagaatcccaaacttaccagaatgctgacatttaagttttacatgccaaagaaagctacagaactgaagcacctgcagtgcctcgaggaggagctaaagccacttgaggaggtgctgaacctcgcccaatcaaagaattttcacctacgcccaagggacctcatctctaacatcaatgttatcgtacttgagctcaagggaagcgagaccacatttatgtgcgagtacgctgacgaaactgctactattgtcgagttcctgaatcgttggattaccttctgccaaagtatcatttccaccctcacc

SEQ ID NO: 33444 - DNA, 459 bp, synthetic construct
  misc_feature 1..459: note = Description of Artificial Sequence: Synthetic coding sequence
  source 1..459: mol_type = other DNA
atgtaccgcatgcagcttctgtcctgcattgcgctgagtctcgctctggtgaccaattccgccccaacatcatcctccaccaagaaaactcaattgcaactagaacatctgctgctggatctgcagatgatcctgaatggtatcaacaactacaagaaccctaaactgacacggatgctgactttcaaattttatatgccaaagaaagccaccgaacttaaacacttgcagtgtctcgaagaggagctaaagcccctggaagaagtgctgaacctagctcagtcaaagaactttcatttgcgccccagggatctgatcagtaatatcaacgtgattgtattggaactgaaagggagcgagaccacctttatgtgcgaatatgccgatgagaccgctactatcgtggaatttctgaataggtggattactttttgccagtcaattatctcaacgttgacc

SEQ ID NO: 33445 - DNA, 459 bp, synthetic construct
  misc_feature 1..459: note = Description of Artificial Sequence: Synthetic coding sequence
  source 1..459: mol_type = other DNA
atgtacagaatgcaactgctttcatgcattgcgttgtcgctggcgctcgtgaccaactccgctcccacctcgtcgagcaccaaaaagacccagcttcagctcgaacatcttctgttggacctgcagatgattcttaacggcatcaataactacaagaatccaaagctgaccagaatgcttacttttaagttctacatgccgaagaaggcgacggaactgaagcatcttcagtgcctggaggaagaacttaaaccacttgaagaggtgctgaacctggcacagtcgaaaaacttccatcttaggcctagggatctgatttccaacattaacgtgatcgtgcttgaacttaaaggatcagaaacgactttcatgtgtgagtacgcagatgaaactgcaacgattgtggagttccttaacagatggataactttttgccaatcgattatctccactcttacc

SEQ ID NO: 33446 - DNA, 459 bp, synthetic construct
  misc_feature 1..459: note = Description of Artificial Sequence: Synthetic coding sequence
  source 1..459: mol_type = other DNA
atgtaccgcatgcaattgctgtcatgcatcgcactgtctctggctcttgtgaccaactccgctccgactagctcctcaacgaagaaaacccagctgcagcttgaacatctgcttctggacctgcagatgatcctcaacggaatcaataactacaagaatccgaagctgactcggatgctgaccttcaaattctacatgccgaagaaagctaccgagcttaagcacctgcaatgcctggaagaagagctgaagccgctggaagaagtgttgaacctcgcgcagtcgaagaatttccacctgcgcccgagggatctcatctcgaacatcaatgtgatagtgttggagctgaagggctccgaaaccaccttcatgtgcgagtatgccgacgaaaccgctaccattgtcgagtttttgaaccggtggatcactttctgtcagtcgatcatttcgaccctcacg

SEQ ID NO: 33447 - DNA, 459 bp, synthetic construct
  misc_feature 1..459: note = Description of Artificial Sequence: Synthetic coding sequence
  source 1..459: mol_type = other DNA
atgtatcggatgcagctactctcttgtatagccctgtcactcgctcttgtcactaattcagcccctacttcttcctctacaaagaagactcagcttcagctcgaacacctgctattagacctccaaatgatactaaacgggataaataactacaaaaacccgaaacttacacgaatgctaactttcaagttttatatgcccaaaaaagccacagagttgaaacacttacagtgcctagaagaggaactgaaaccactcgaagaagtgttgaatctggcccagtccaaaaattttcatttgagacctagagatctcatctcgaatataaacgtgatcgtgctcgaactcaaggggtccgaaactacttttatgtgtgaatatgctgacgaaacagccacaatcgtcgaattcctcaatcgctggattacattctgccagtctatcatctcaacactgaca

SEQ ID NO: 33448 - DNA, 459 bp, synthetic construct
  misc_feature 1..459: note = Description of Artificial Sequence: Synthetic coding sequence
  source 1..459: mol_type = other DNA
atgtataggatgcagctgctctcttgcatcgctctttcactcgccctggtcactaattctgcgcccacctccagttctacaaaaaagacacagctccagctggaacatttactcttagatcttcagatgattctcaatggcattaacaactacaaaaacccgaagctgacccgaatgctgaccttcaaattttatatgccgaaaaaagccacagaactgaagcatctgcagtgcttagaagaggagctgaagccactggaagaggtgctgaacctggcgcagagtaagaactttcacctaagacccagagacctcattagcaacataaacgtgatcgtactggagttgaagggttccgagactacctttatgtgtgaatacgccgacgaaactgcaaccattgttgaatttttgaaccggtggataactttctgtcagtcaattataagtacacttacc

SEQ ID NO: 33449 - DNA, 459 bp, synthetic construct
  misc_feature 1..459: note = Description of Artificial Sequence: Synthetic coding sequence
  source 1..459: mol_type = other DNA
atgtaccgcatgcagttactatcctgcatcgcactaagcctcgctctggtgaccaatagcgccccaacatccagtagtaccaaaaagacacagctccaactggaacacctgcttctagacctgcagatgatcctaaatggcataaataactacaaaaatccaaaattaactagaatgcttactttcaagttttacatgcctaaaaaagccacagagttaaaacacctgcagtgcctggaagaggagctaaagccgttagaggaagtgctgaatctggcccagtcaaagaatttccatctgcgtccaagggatctgattagtaacattaatgtgattgtgctggagctgaagggatccgagaccacattcatgtgtgagtatgctgatgaaactgccactatagttgagttcctcaataggtggataactttctgtcagtcaattatctccacattgaca

SEQ ID NO: 33450 - DNA, 459 bp, synthetic construct
  misc_feature 1..459: note = Description of Artificial Sequence: Synthetic coding sequence
  source 1..459: mol_type = other DNA
atgtatcgcatgcagttgctttcctgcattgcactcagcttggcactggtgaccaactcggcacctacttcgagctccacgaaaaagacccaactccagttggagcacctcctgctcgatctccagatgattcttaatggaattaacaattacaagaacccgaagctgacccggatgcttactttcaagttctatatgcctaagaaggcgacggagctgaaacatctccagtgcctcgaagaggaacttaaacctctcgaggaggtccttaacctggcacagtcgaagaattttcaccttagaccaagggacctgatatccaacatcaacgtcatcgtcctcgaattgaagggaagcgaaaccacctttatgtgtgagtacgctgatgaaacggccactattgtggaatttcttaatcgttggattactttttgccaaagcatcatatctacccttact

SEQ ID NO: 33451 - DNA, 459 bp, synthetic construct
  misc_feature 1..459: note = Description of Artificial Sequence: Synthetic coding sequence
  source 1..459: mol_type = other DNA
atgtaccgcatgcagctgctgtcctgcatcgcccttagcctggccctcgtgacgaacagtgccccgacttcctccagtaccaagaagacccagctgcaacttgagcatttgctgttggatttgcaaatgatacttaacggaattaacaactacaagaacccaaaactgactagaatgctcacgttcaagttctatatgcccaagaaggcgaccgagctcaagcatttgcaatgtctggaggaggagcttaaacctctggaggaagtgctgaatctcgcccagtccaagaactttcacttgaggcctcgggatctcataagcaacatcaatgtaattgtgctggagctcaagggcagtgaaaccacctttatgtgcgagtatgccgacgagaccgctaccatcgttgagttcttgaataggtggatcaccttttgtcaatccatcatatccactctgaca

SEQ ID NO: 33452 - DNA, 459 bp, synthetic construct
  misc_feature 1..459: note = Description of Artificial Sequence: Synthetic coding sequence
  source 1..459: mol_type = other DNA
atgtatcgaatgcaactgttgagttgcatcgctctctcactggcattagttacaaatagtgctcctacaagcagttctacgaaaaagactcagctgcaactcgagcatttgctccttgaccttcaaatgattttgaacggaataaataactataaaaatccaaagcttactagaatgcttacttttaaattttatatgcccaaaaaagctacagagcttaagcacctgcagtgtttggaagaggaacttaagcccttggaggaagttttgaacctcgctcaatctaagaattttcatttaaggccgagggatttgattagcaatatcaatgttatcgttttagaattgaaaggctctgaaacgactttcatgtgtgagtacgcagacgaaaccgctactatagtggagttcttgaacagatggattactttctgtcagagtataatctccactttgaca

SEQ ID NO: 33453 - DNA, 459 bp, synthetic construct
  misc_feature 1..459: note = Description of Artificial Sequence: Synthetic coding sequence
  source 1..459: mol_type = other DNA
atgtaccggatgcaactcctctcctgcatcgcactctcactcgcccttgtgacgaattcagccccgacctcctcctcgactaagaaaacccagttgcagctggagcacctgcttctggacctccaaatgatcctgaacggaatcaacaattacaagaatcccaaactgaccaggatgctgaccttcaagttctacatgccgaagaaggcgactgagctgaagcacctgcaatgcctggaagaagagttgaaaccactcgaagaggtgctgaaccttgcgcagtcgaagaactttcatctcagacctcgcgacttgatctcgaatatcaacgtcattgtcctggaactgaagggcagcgagacgaccttcatgtgcgaatacgctgatgaaactgccaccattgtggaattcctgaaccgctggatcactttttgtcagagcatcatctctaccctgact

SEQ ID NO: 33454 - DNA, 459 bp, synthetic construct
  misc_feature 1..459: note = Description of Artificial Sequence: Synthetic coding sequence
  source 1..459: mol_type = other DNA
atgtacaggatgcagctgctgtcgtgtattgctctgtccctcgcgctggtgaccaactcggcgccgacctcctcctcgaccaaaaagacccagctgcaactggagcacctgctcctggacttgcaaatgatcctgaacgggatcaacaattacaagaacccgaagctcacccgcatgcttacgttcaagttttacatgcccaaaaaggcaaccgagctgaagcacttgcaatgtttggaggaggagctgaagccactcgaagaagtgctgaacctggcccagagcaagaatttccacctgaggccgcgggatctgatcagcaatatcaacgttatcgtgctcgagttgaagggatcggaaactaccttcatgtgtgaatatgcagacgaaaccgccactattgtcgaattcctgaacagatggatcaccttctgccagtccattatctcgaccctcact

SEQ ID NO: 33455 - DNA, 459 bp, synthetic construct
  misc_feature 1..459: note = Description of Artificial Sequence: Synthetic coding sequence
  source 1..459: mol_type = other DNA
atgtaccgaatgcagctcctcagttgtatcgccctctctctggcccttgtaacaaattccgcccccacatcttcatcaacaaaaaagactcagctgcagctggagcacctcctcctcgatcttcagatgatcctcaatgggataaataattacaaaaatcctaaactcacacgtatgctgacatttaaattttacatgcctaaaaaggcaactgagctgaagcacttgcagtgccttgaggaagagctcaagcccctcgaagaagtcttaaatctcgcccagtcaaaaaactttcacctgcggccccgggatctaatttccaatataaatgtgatagtgctcgaactgaaagggtctgaaacaacatttatgtgtgaatatgcagatgaaacggctactatcgttgaattcctgaacaggtggataactttttgccagtctatcatctccactctaaca

SEQ ID NO: 33456 - DNA, 459 bp, synthetic construct
  misc_feature 1..459: note = Description of Artificial Sequence: Synthetic coding sequence
  source 1..459: mol_type = other DNA
atgtacaggatgcagctgctgagttgtatcgcactgagcctcgcactcgttacaaatagcgcccccaccagctcaagcactaagaaaacccagctgcagctggagcatttactcctggatctgcaaatgattctgaatggaatcaataactacaaaaatcctaaactgacccgcatgctcaccttcaaattttatatgcctaaaaaggcaaccgaactcaagcatctgcagtgcctggaagaggaattgaaaccactggaggaagtcctgaatttggctcagtcgaagaacttccatttgcgtccacgcgacttgatttccaatattaatgttatagttctcgagcttaagggttctgaaaccactttcatgtgtgagtatgccgacgaaacggcgaccatcgtcgaatttctcaatcgatggataaccttttgtcaaagcatcatatctaccctgacg

SEQ ID NO: 33457 - DNA, 459 bp, synthetic construct
  misc_feature 1..459: note = Description of Artificial Sequence: Synthetic coding sequence
  source 1..459: mol_type = other DNA
atgtacagaatgcagctgctaagctgtattgccctatctctggcactcgtcactaatagtgcccccacatccagctcaacaaagaagacacaacttcagctagagcacttgctgctcgatctgcagatgatcctaaacggtataaacaattacaagaatccaaaactgaccagaatgctgacctttaaattttatatgcctaagaaagccactgaactgaagcatctccagtgtctggaggaagaattgaagccgcttgaagaggtgctcaatcttgctcagtcaaaaaacttccacctgcgtcccagagacctgatctctaacattaatgtgattgtgttggagctgaagggcagcgagactacgttcatgtgtgaatacgccgacgaaacagctacaatcgttgaattcttaaatcgctggattaccttctgccaatccatcatcagcactctgacc

SEQ ID NO: 33458 - DNA, 459 bp, synthetic construct
  misc_feature 1..459: note = Description of Artificial Sequence: Synthetic coding sequence
  source 1..459: mol_type = other DNA
atgtaccgcatgcaattactctcctgtatcgcgctttctcttgcattggttacaaattccgcaccaacatcttcatcaacgaaaaaaacacaactgcaactcgaacatctgctactcgatcttcaaatgatcttgaatggaattaacaattacaaaaatcctaaacttacccgaatgcttacattcaagttctacatgccaaaaaaggcaacagagctaaaacacttacaatgccttgaagaagaattgaagcctctggaagaagttttaaatcttgctcaaagtaaaaactttcatttacgaccaagagatcttatttctaatatcaacgttattgtactggagctaaaaggttcagagacaactttcatgtgcgaatatgccgatgaaaccgcaactatcgttgaatttttgaacagatggataacattctgccagtcaattataagtactttaact

SEQ ID NO: 33459 - DNA, 459 bp, synthetic construct
  misc_feature 1..459: note = Description of Artificial Sequence: Synthetic coding sequence
  source 1..459: mol_type = other DNA
atgtaccgaatgcagctgctcagttgcatcgccttaagcctagccttggtgaccaactctgcccctacctcctcctcaaccaagaaaacccagttgcaactcgagcatttgctgctggatctacagatgattctgaacggaattaacaattacaagaacccaaagttgactaggatgctcacctttaaattctacatgcctaagaaagcgactgagctgaagcatctccagtgtctcgaggaagagcttaaaccacttgaagaggtcctcaacctcgcccagtcaaagaacttccacctaaggccacgagacctgatatcaaatatcaatgttattgtcctggaattgaagggctcggaaactacttttatgtgcgaatacgctgacgaaactgctacaatcgtggaatttttgaatcgttggataactttctgccaatccattatcagcaccctcacg

SEQ ID NO: 33460 - DNA, 459 bp, synthetic construct
  misc_feature 1..459: note = Description of Artificial Sequence: Synthetic coding sequence
  source 1..459: mol_type = other DNA
atgtaccgcatgcagctcctgtcttgcatcgctttgtctcttgccctggtgaccaacagcgctcctacgtcttcttccacgaagaagacacagctccaactggagcacctgctgcttgatctgcaaatgatccttaacgggattaataactacaagaatcctaaattgaccaggatgctgactttcaaattttacatgccaaagaaagccacagagctcaagcacctgcagtgcttggaggaggagctgaagcccttggaggaagttctcaacctggctcaatccaagaattttcacctgcggccccgagaccttatttcaaacatcaacgtgatagtcctggagttgaagggttccgagactaccttcatgtgtgaatatgctgacgaaactgccaccatagtggaatttctgaaccggtggatcacattctgtcagagtatcatcagtactctgaca

SEQ ID NO: 33461 - DNA, 459 bp, synthetic construct
  misc_feature 1..459: note = Description of Artificial Sequence: Synthetic coding sequence
  source 1..459: mol_type = other DNA
atgtaccgcatgcagctgctgtcctgcatcgcgctgtcgctggccctggtcactaatagtgcccctacctcatccagtaccaaaaagactcagctccaactcgaacacttgctcctggacctccaaatgatactgaacggaatcaataactacaaaaaccccaagctgacccgcatgcttactttcaaattctacatgccgaaaaaggcaaccgaattgaagcatttgcagtgcctcgaagaagagctgaagcctcttgaggaagtgcttaacctggcgcagtctaagaacttccacctgcggccaagagatctgatctccaatatcaatgtgatcgtccttgaactcaagggctcggaaaccacgtttatgtgcgagtacgccgatgaaaccgcaaccattgtggaattcctgaaccgatggatcaccttctgtcaatctatcatctccaccctgacc

SEQ ID NO: 33462 - DNA, 459 bp, synthetic construct
  misc_feature 1..459: note = Description of Artificial Sequence: Synthetic coding sequence
  source 1..459: mol_type = other DNA
atgtatagaatgcaattattatcatgcattgctttatcacttgctctcgtcacaaattctgctccaacatcctcctccactaaaaaaactcagctacaactagagcatcttttgttggatctgcagatgatattgaacggaataaataattacaagaatccaaaactgactcgtatgttgacattcaagttctatatgccgaagaaagcaacagaactgaagcatcttcaatgcctggaagaagaattgaaaccattggaagaggttcttaatttggctcagtcaaaaaacttccatcttcgtccaagagatctcatttctaacatcaatgttattgttctggagcttaaaggttctgaaacaactttcatgtgcgaatacgctgatgaaacagcaactatcgtagagtttcttaatcgatggataacgttctgtcagtcaattatttcgaccctcact

SEQ ID NO: 33463 - DNA, 459 bp, synthetic construct
  misc_feature 1..459: note = Description of Artificial Sequence: Synthetic coding sequence
  source 1..459: mol_type = other DNA
atgtaccggatgcagctgctgagctgcattgcactttccctggcactggtcactaactcggcaccaacctcgtcgtcgactaagaaaacccagctgcaactcgagcatctccttctggatctccagatgatactgaatgggattaacaactataagaaccccaaacttactcgtatgcttacctttaagttttacatgccaaagaaggcaacggaactgaagcatcttcagtgtctcgaagaggagcttaaaccccttgaggaggtcctgaacttggcgcaaagcaagaatttccacttgaggcctagagatcttatttccaacattaacgttatcgtgttggagcttaaaggctcagagactacctttatgtgtgagtacgcagatgagactgcgactatagtggaatttctcaacaggtggatcactttttgtcaatcaattatctccacccttacc

SEQ ID NO: 33464 - DNA, 459 bp, synthetic construct
  misc_feature 1..459: note = Description of Artificial Sequence: Synthetic coding sequence
  source 1..459: mol_type = other DNA
atgtaccggatgcagctcttgtcctgcatagctttgtcacttgcgcttgtgaccaactccgcacctacctcgtcgtccacgaagaaaacccagctgcaactcgaacacctcctcctcgacttgcagatgatcttgaacggaatcaacaactacaaaaatcccaagctgaccagaatgctgacctttaagttctacatgccgaagaaggccactgaactgaagcacctgcaatgcctggaagaggaattgaagccattggaagaggtcctgaacctggcccagagtaaaaacttccatcttaggccgcgcgatctcatatcgaatatcaatgtcatcgtgctcgaactcaaggggtctgagactaccttcatgtgtgagtacgccgacgaaaccgcgactatcgtagagttcctgaaccgctggatcactttttgccaaagcattatctcgactctgact

SEQ ID NO: 33465 - DNA, 459 bp, synthetic construct
  misc_feature 1..459: note = Description of Artificial Sequence: Synthetic coding sequence
  source 1..459: mol_type = other DNA
atgtatagaatgcagcttctgtcatgcatagccctatccttagctttggtcacaaacagcgctccaacaagctctagcacaaagaaaacccaactacagctcgaacacctgctgctggacctacagatgatactcaatggaatcaacaattacaaaaatccgaagctgacaagaatgctgacctttaaattttatatgcctaaaaaggctacagaattgaaacacctgcagtgtttggaggaggagttgaagcccctggaggaagtgttgaatttggcccagtctaaaaactttcacctgagacctagagatctgatatcgaacatcaacgtcattgtcctggagttaaaaggcagcgaaactacttttatgtgcgaatatgccgacgagaccgctacgattgtggagttcctaaaccgatggatcacattttgtcaaagcatcatctctacgctcacg

SEQ ID NO: 33466 - DNA, 459 bp, synthetic construct
  misc_feature 1..459: note = Description of Artificial Sequence: Synthetic coding sequence
  source 1..459: mol_type = other DNA
atgtaccggatgcagctgttgagctgcattgccctctctctcgcacttgtgacaaacagtgctccgacatcctccagtactaagaagacccagctgcagctggagcacctcctgctcgatttacaaatgatcctgaacggaataaataactataagaatcctaaactcacaaggatgctcacttttaagttctacatgcccaaaaaggctacagagctcaagcatctgcaatgccttgaggaggagcttaagccactcgaggaggtgctgaacctcgcccagagtaagaatttccatctgcggcctcgagatcttatctcaaatatcaatgtgattgttctggagctgaaaggctctgaaaccacttttatgtgtgaatacgcggatgagaccgctacgatcgtggaatttttgaaccgctggatcacattttgtcaaagcattatttcgacactgact

SEQ ID NO: 33467 - DNA, 459 bp, synthetic construct
  misc_feature 1..459: note = Description of Artificial Sequence: Synthetic coding sequence
  source 1..459: mol_type = other DNA
atgtaccgcatgcaactgctgtcctgtatcgccctgtcactcgccctggtgactaactccgctcctacctcctcctccacgaaaaagactcagcttcagcttgaacacctcctgctggatctgcagatgatccttaacggtattaacaattacaaaaacccgaagctgacccggatgctgactttcaagttttacatgcctaaaaaggccactgaactgaaacatctgcagtgcctggaggaagagctcaagccactggaggaagtgctcaacctggcacagtcgaagaattttcacctgcggccccgcgacctcatctccaacatcaacgtgatcgtgctggagctgaagggctctgagactaccttcatgtgcgaatacgcggacgagacggccaccatcgtggagtttcttaaccgctggatcaccttttgtcaaagcatcatctcgaccctgacc

SEQ ID NO: 33468 - DNA, 459 bp, synthetic construct
  misc_feature 1..459: note = Description of Artificial Sequence: Synthetic coding sequence
  source 1..459: mol_type = other DNA
atgtacaggatgcagctattatcctgtatagcactttctctggcgcttgtgacaaattctgcccccacttctagttctactaaaaaaactcagctccaactcgaacacctgctcctcgatcttcagatgatcctcaacgggatcaataactacaaaaatcccaaactgactcggatgctcacatttaaattctatatgcccaaaaaagcgacagagctcaaacacctgcagtgcttagaggaggaattaaagccacttgaagaagtactcaatctggctcagtcgaagaacttccatctcagaccaagagatctcattagtaacatcaatgttatcgtgctggaactaaaggggtcagaaacaacattcatgtgtgaatacgccgacgaaactgctactatagtcgaattcttaaatcgatggattacattctgtcagtcgattatatcaacattaaca

SEQ ID NO: 33469 - DNA, 459 bp, synthetic construct
  misc_feature 1..459: note = Description of Artificial Sequence: Synthetic coding sequence
  source 1..459: mol_type = other DNA
atgtaccgtatgcaactgctgtcttgcattgcgctttcactggcccttgtcacaaattctgcgcctacttcatcctcaactaagaaaacgcagctgcaactcgagcatctgctgttggatttacagatgattttaaacggaatcaataactacaaaaacccaaaattaacaagaatgttgacttttaagttttatatgcctaaaaaagcaacagaacttaaacacctgcaatgtcttgaagaagaacttaaacctttagaagaagtgctcaatctggcgcaatcaaaaaactttcatcttcggcctcgagacctgattagcaacattaacgtgattgttttggagctaaaaggttcggagactacttttatgtgcgaatacgcggatgagaccgcaacgatcgtcgaatttctgaatagatggatcacgttctgccaatccatcatttccacgcttacc

SEQ ID NO: 33470 - DNA, 459 bp, synthetic construct
  misc_feature 1..459: note = Description of Artificial Sequence: Synthetic coding sequence
  source 1..459: mol_type = other DNA
atgtatagaatgcaattattatcatgtattgcattatctttagctcttgttacaaattcagcaccaacttcttcatcaacaaagaagactcaattacaacttgagcatttattattagatttacaaatgattttaaatggtataaataattataaaaatccaaaacttacaagaatgcttacatttaaattttatatgccaaaaaaggcaacagaattaaaacatcttcaatgtcttgaagaagaattaaaaccattagaagaagttcttaatttagcacaaagtaaaaattttcatttaagaccaagagatttaatttctaatataaatgtcatcgtacttgaactaaagggaagtgaaactactttcatgtgtgaatacgcagatgaaacagctacaattgttgaatttttaaatcgttggataacattttgtcaaagtatcattagtactttaacc

SEQ ID NO: 33471 - DNA, 459 bp, synthetic construct
  misc_feature 1..459: note = Description of Artificial Sequence: Synthetic coding sequence
  source 1..459: mol_type = other DNA
atgtatagaatgcagctgctgagctgcatagcactgagcctggcactcgtcacaaactcagctcctacaagctcatccactaagaaaacgcagctgcaactggagcatttgctgttggatttgcagatgatccttaacggaattaataattacaaaaaccccaaactgactagaatgctgacatttaaattttacatgcccaagaaggcgacagagctcaagcacctgcagtgccttgaggaggagcttaagcctctggaagaggtgctgaacctggcgcaaagtaagaacttccatctcaggcctagggaccttatctctaacatcaatgtgatcgtcctcgaactgaaaggaagtgaaactactttcatgtgcgagtacgccgacgagacagccaccatagtggagtttcttaacaggtggattaccttttgtcaatccatcatcagcacactgact

SEQ ID NO: 33472 - DNA, 459 bp, synthetic construct
  misc_feature 1..459: note = Description of Artificial Sequence: Synthetic coding sequence
  source 1..459: mol_type = other DNA
atgtacaggatgcaactactctcctgtatcgccttgtctttggccttagtgacgaattcagccccaactagcagcagcactaagaagacccagttgcagctcgaacatttgctgctggatctgcagatgattctgaacggcatcaacaattataaaaatccgaagctgaccagaatgctaacttttaagttctatatgccaaaaaaggctaccgaacttaaacacctgcagtgtctagaagaggagctgaaaccccttgaggaggtactcaatctagcacagtcaaaaaacttccacctgcgcccacgagacttaataagcaatatcaatgtcattgtcctggagctgaagggatctgagacaaccttcatgtgtgaatatgccgacgagaccgcaacgattgtcgagtttctcaacaggtggataaccttctgccagtcaatcatcagtaccttgaca

SEQ ID NO: 33473 - DNA, 459 bp, synthetic construct
  misc_feature 1..459: note = Description of Artificial Sequence: Synthetic coding sequence
  source 1..459: mol_type = other DNA
atgtatcggatgcagctgctgtcctgcatcgctctgagcctggcgctggtgaccaactcggcgccaacttcatcgtccactaaaaagacgcagcttcaactcgagcaccttcttttggatcttcaaatgattctgaatggaataaacaactacaagaatccgaaactgaccagaatgttgacgtttaagttctacatgcccaagaaggctaccgagctgaagcatttgcagtgtcttgaagaagagctgaaacctctggaagaagtccttaacctggcgcaatccaagaatttccatcttcggcctcgcgacctgatttcgaacatcaatgtgatagtgctggagctgaagggttccgaaaccacttttatgtgtgagtacgcagacgaaaccgctaccattgtcgaatttcttaatcgatggattacgttttgtcaatcgatcatttcgactctgact

SEQ ID NO: 33474 - DNA, 459 bp, synthetic construct
  misc_feature 1..459: note = Description of Artificial Sequence: Synthetic coding sequence
  source 1..459: mol_type = other DNA
atgtaccggatgcagctgctgagctgcatcgctctgtcactggctctcgtgaccaactccgcacccacttcgtcgagtaccaaaaagactcaactccagctcgaacatctgcttttggaccttcagatgatcctcaatgggatcaataactataagaacccaaaactgacccggatgctgaccttcaagttctacatgccaaaaaaggccaccgagctcaaacaccttcagtgcttggaggaggaactgaagcctctggaagaagtgcttaaccttgcgcagtccaagaatttccacctgaggcccagggatctgatctccaacattaacgtgattgttctggagctcaagggctcggaaaccaccttcatgtgtgagtacgccgacgaaacggctaccatcgtcgagtttctgaacagatggatcacgttttgccagagcatcatttcgactctgact

SEQ ID NO: 33475 - DNA, 459 bp, synthetic construct
  misc_feature 1..459: note = Description of Artificial Sequence: Synthetic coding sequence
  source 1..459: mol_type = other DNA
atgtacaggatgcagcttctgtcctgcattgcacttagccttgccttggtcactaattccgcgccgaccagctccagcactaagaaaacccaattgcaactcgaacacctcctcctcgacctgcaaatgattttgaacgggattaacaactacaagaaccctaagctgacgagaatgttgactttcaaattctacatgccaaagaaggcgaccgagttgaagcacctgcagtgtctggaagaggagcttaaaccgcttgaggaagtactgaatttggcacaatcgaagaattttcatcttcggcctagggatctgatctcaaacatcaatgtgatagtgctcgaactcaagggttctgaaactacctttatgtgtgaatacgcagatgagacggcgactattgtggagtttctgaaccgttggatcaccttttgccagtcgattatctcgacccttact

SEQ ID NO: 33476 - DNA, 459 bp, synthetic construct
  misc_feature 1..459: note = Description of Artificial Sequence: Synthetic coding sequence
  source 1..459: mol_type = other DNA
atgtatagaatgcagttgctaagctgtatcgcgctgagtctagccctcgttaccaactcagcacctaccagtagcagtaccaaaaagacccagctgcagctcgaacatttgctcctagacctccagatgatcctgaatgggattaataactataagaaccctaaactcacacgcatgctgaccttcaagttttacatgcctaagaaggcaactgaactcaagcatttgcagtgtttagaggaggagttaaagccactcgaggaagtgttgaaccttgcccagagtaagaactttcaccttcgccctcgggatcttatctcaaatatcaacgtcattgtgttggagctgaagggctctgaaacaacattcatgtgtgagtacgcggacgagaccgcaaccatcgtcgagtttctgaatcggtggatcaccttctgtcagtccatcatttcaactctgacc

SEQ ID NO: 33477 - DNA, 459 bp, synthetic construct
  misc_feature 1..459: note = Description of Artificial Sequence: Synthetic coding sequence
  source 1..459: mol_type = other DNA
atgtataggatgcagctgttatcatgcatcgctctaagtcttgccctcgttaccaattccgctccaacctcttctagcacaaagaagacacagcttcagctcgaacacttgctcttggatctgcagatgatcctgaacggaatcaacaactataagaacccaaaactcacccgtatgctcaccttcaagttttatatgcccaaaaaggccacagagttgaagcacctccaatgccttgaggaagaattgaagcctctggaggaagttctgaatttggcccagtccaagaatttccatttaagacctagagacctcatttctaatattaacgttatcgttctggaactgaagggttcagagacaacgttcatgtgcgagtacgccgacgaaaccgcgactatagtggaattcctcaatagatggattaccttctgtcagagcattatcagtaccctcaca

SEQ ID NO: 33478 - DNA, 459 bp, synthetic construct
  misc_feature 1..459: note = Description of Artificial Sequence: Synthetic coding sequence
  source 1..459: mol_type = other DNA
atgtacagaatgcaattgctgagctgcattgccctgagcctggcactggttaccaatagtgccccaacttccagctctacaaaaaaaacccaactgcagctggagcatttgttgctggacctacagatgattctaaatggcataaacaactataagaacccgaagcttacaaggatgctgacctttaaattctatatgccaaagaaggccacggaattgaagcatcttcagtgccttgaggaggaacttaagccactggaggaggtattgaatctcgcacagagcaaaaactttcacttacggccaagagacctcatatctaacatcaatgtaatagtcctggaactgaaggggtcagagacgacttttatgtgcgaatatgctgacgagaccgctacaattgtggaattcctcaacagatggatcacattctgccagagcataatatcaacacttaca

SEQ ID NO: 33479 - DNA, 459 bp, synthetic construct
  misc_feature 1..459: note = Description of Artificial Sequence: Synthetic coding sequence
  source 1..459: mol_type = other DNA
atgtatagaatgcaactgttgtcgtgtatagcactgtcactcgcactggtgacaaatagcgcaccaaccagtagttcaacgaaaaagacccagctgcagctcgagcacctgctgctagatctgcagatgattctgaacgggataaacaattacaaaaacccaaaactgacacggatgctgacattcaagttctacatgcccaagaaagctactgagctgaaacatctgcagtgcttagaggaagagttaaagcctctcgaggaagtgctcaacctggcccagagtaaaaacttccacttacggccacgggacctgatctctaatataaatgtgattgtgctggagctgaaaggaagcgaaactacttttatgtgcgagtacgccgatgaaacagcgaccatcgtagagtttctgaaccgatggatcacattttgccaaagcatcatctccacccttaca

SEQ ID NO: 33480 - DNA, 459 bp, synthetic construct
  misc_feature 1..459: note = Description of Artificial Sequence: Synthetic coding sequence
  source 1..459: mol_type = other DNA
atgtaccgcatgcaacttctgagctgtatagcactgtctttagctctcgtcacgaacagcgctccaaccagttcttcaacaaagaagacacagctgcaactggaacatttactccttgatcttcagatgatcttaaacggcattaacaattataaaaatccaaaattgacacgtatgctgacatttaagttctatatgccgaagaaagcgacagagctcaaacatttacaatgcttggaagaggagctcaagcctctagaggaagttctgaatcttgctcaaagcaaaaattttcatctgcgccctagggacttaatttcaaacattaacgtgattgtacttgagcttaaaggaagcgaaactacattcatgtgcgagtatgcagatgaaaccgctaccatcgtagaattcttaaatcggtggatcaccttttgtcagagtattatttcaacgctaacc

SEQ ID NO: 33481 - DNA, 459 bp, synthetic construct
  misc_feature 1..459: note = Description of Artificial Sequence: Synthetic coding sequence
  source 1..459: mol_type = other DNA
atgtatcgcatgcaacttctctcttgtatagccctgtctcttgcacttgttactaactctgcccccacaagtagtagtactaagaaaacacagcttcaactggaacatctcctccttgatctgcagatgatactgaatgggattaataactacaaaaatccaaagcttacacgcatgctgactttcaagttctatatgccaaaaaaagcaacagagctgaaacacttacagtgcctcgaggaagagctaaaaccactggaggaggtcctcaacctagctcaatctaaaaatttccacctaaggcctcgggatctcatatccaatatcaacgtgatcgtgctggaattaaaagggagtgaaactactttcatgtgtgaatatgccgatgagacagctacaatagtggaattcttaaaccgatggatcactttctgtcagtctataataagtacactgact

SEQ ID NO: 33482 - DNA, 459 bp, synthetic construct
  misc_feature 1..459: note = Description of Artificial Sequence: Synthetic coding sequence
  source 1..459: mol_type = other DNA
atgtaccggatgcaactcctgagctgtatcgccttgtccctggccctcgtgacgaattccgcgcccacctcatcctcaacgaaaaagactcagttgcagctggaacatctgctcttggatcttcagatgatcctgaatggaataaacaattacaaaaaccccaaactcacccgcatgctcacctttaagttttacatgcctaagaaggcaactgagctcaagcatctgcagtgccttgaggaggaactcaaaccattggaggaagtgcttaatcttgctcaaagcaagaactttcatctgcgacctcgagatctcatcagcaacatcaacgtgatcgttctggaactgaagggatcggaaactaccttcatgtgtgaatacgcagacgagacggccaccattgtggaatttctgaacagatggattaccttttgccaatccatcatttcgaccctcact

SEQ ID NO: 33483 - DNA, 459 bp, synthetic construct
  misc_feature 1..459: note = Description of Artificial Sequence: Synthetic coding sequence
  source 1..459: mol_type = other DNA
atgtatcggatgcagctgctctcatgcatagctctatctctggccctggtcacaaactctgctcctacgagttcctccactaagaagacgcaattgcaactggagcatttgctgttggacctccagatgattttgaacggaataaataactataagaatccgaaacttaccaggatgcttacatttaaattctatatgcccaagaaggcaaccgaactcaagcacctgcaatgcctagaggaggaattgaagccactcgaggaggtgctcaatctggcacagtcaaaaaattttcatctgcgtccgagagacctgatcagtaatatcaatgtgatagtccttgagctgaaaggctcagagaccacctttatgtgcgagtacgcagacgaaactgctaccattgtagagttcctgaaccggtggattaccttctgtcagtccattatctctacactgaca

SEQ ID NO: 33484 - DNA, 459 bp, synthetic construct
  misc_feature 1..459: note = Description of Artificial Sequence: Synthetic coding sequence
  source 1..459: mol_type = other DNA
atgtaccgcatgcagctgctgtcctgtatcgcgctgtccctggccctcgtcaccaattctgcccctactagctcctcgacgaagaaaacccagctccagctcgaacatctgctgctggacctgcaaatgatcctgaacggaatcaataactacaaaaatccgaagttgacccggatgcttacttttaagttctacatgccgaagaaggccaccgagcttaagcacttgcagtgcctggaggaggagctgaagccactggaagaggtgcttaatcttgcgcagagcaagaacttccatctgcgccctcgcgacctcattagcaatatcaacgtcatcgtcctggaactgaagggaagcgagactacttttatgtgcgaatacgccgatgagactgcaactatcgttgaattcctgaatcggtggatcaccttttgccagtccattatctcgaccctcact

SEQ ID NO: 33485 - DNA, 273 bp, synthetic construct
  misc_feature 1..273: note = Description of Artificial Sequence: Synthetic coding sequence
  source 1..273: mol_type = other DNA
atgtctgctgccgacaagagggcacaccacaacgccctcgagcgcaaacgtcgggatcacatcaaggacagctttcattctcttcgcgactcggtgccaagtctgcagggggaaaaagcttccagggcccagatcctggacaaggccaccgaatacatccagtacatgagacgaaaaaaccacacacaccagcaggacatcgatgacctaaagcgccaaaacgccctacttgagcaacaagtgcgcgccctagagaaggctaggagtagtgcc

SEQ ID NO: 33486 - DNA, 273 bp, synthetic construct
  misc_feature 1..273: note = Description of Artificial Sequence: Synthetic coding sequence
  source 1..273: mol_type = other DNA
atgtccgccgctgacaagcgcgcccatcacaatgccctcgagcgaaagcgccgagatcacatcaaagatagctttcactccctcagggactctgtccctagtttacagggcgagaaagcgtccagggctcagatcttagataaagccaccgaatatattcagtacatgaggagaaagaaccacacccaccagcaggacatcgacgacctgaaaagacagaatgcgttgctggagcagcaagtgagggctctggaaaaagctagatcctctgcc

SEQ ID NO: 33487 - DNA, 273 bp, synthetic construct
  misc_feature 1..273: note = Description of Artificial Sequence: Synthetic coding sequence
  source 1..273: mol_type = other DNA
atgtctgccgcggataaaagggcacatcacaatgctcttgagcggaaaaggagggatcatataaaagattctttccattctctcagagattctgttccttcattacagggagagaaagcttccagagcccagatccttgacaaagcgacagaatatatccaatatatgcggcggaaaaatcacacacaccagcaggatatagatgacttaaaaagacaaaatgctcttctggagcagcaggtccgcgcacttgaaaaagctaggtcaagtgca

SEQ ID NO: 33488 - DNA, 273 bp, synthetic construct
  misc_feature 1..273: note = Description of Artificial Sequence: Synthetic coding sequence
  source 1..273: mol_type = other DNA
atgtcagcggcagataagcgcgcacatcacaatgccctcgaaagaaagaggagggatcacatcaaagatagctttcatagcttgagggacagcgtgccaagcctgcagggcgagaaagcatcaagagctcagatcttagacaaggcgacggagtatattcaatatatgaggagaaagaaccacacgcaccaacaagatatagatgacctcaagcgtcagaatgctttgttagagcaacaggtgcgcgcactcgagaaggcaaggagtagcgcc

SEQ ID NO: 33489 - DNA, 273 bp, synthetic construct
  misc_feature 1..273: note = Description of Artificial Sequence: Synthetic coding sequence
  source 1..273: mol_type = other DNA
atgagtgccgccgataagcgggcgcatcataatgccttggagcgcaagagacgggaccacatcaaggatagcttccattcattgcgagatagcgtcccttctctccagggcgagaaggcatcacgagcccagattctcgacaaagctaccgagtatatacagtatatgaggagaaagaaccacacacatcaacaagacatcgatgacctgaagaggcagaatgccctcctggagcagcaggtcagggctttagagaaggcgaggagcagtgcc

SEQ ID NO: 33490 - DNA, 273 bp, synthetic construct
  misc_feature 1..273: note = Description of Artificial Sequence: Synthetic coding sequence
  source 1..273: mol_type = other DNA
atgagtgccgccgataagcgggcccaccataatgctttagaaagaaaaaggagagaccacattaaagattcgttccacagtctaagagatagtgtgcctagtttacagggagaaaaggcatctcgggctcagatactggataaagccactgaatacatccagtacatgcggcgaaaaaaccatacacaccagcaggatatcgatgatcttaaaaggcagaacgccctccttgaacagcaagtcagagcattagaaaaagcccggagttcggct

SEQ ID NO: 33491 - DNA, 273 bp, synthetic construct
  misc_feature 1..273: note = Description of Artificial Sequence: Synthetic coding sequence
  source 1..273: mol_type = other DNA
atgtccgcagctgataagcgggcccatcacaatgccctggaaaggaaacgacgggatcacataaaagattcttttcactctttgcgcgattccgtgccttctctgcagggagaaaaagccagtcgggctcagatattagataaagctacagagtatatccagtatatgagaaggaaaaaccatacacatcagcaggacattgatgatctgaagcgacagaacgctctcctagagcagcaggtccgcgctctagaaaaagctcggtcctcagct

SEQ ID NO: 33492 - DNA, 273 bp, synthetic construct
  misc_feature 1..273: note = Description of Artificial Sequence: Synthetic coding sequence
  source 1..273: mol_type = other DNA
atgagtgcagctgacaagagagctcatcacaacgcgttggagaggaagagacgggaccatattaaggacagctttcacagtttgcgagattctgtgccatctctccagggagagaaggccagtcgagcccaaatcctggacaaggctaccgagtatatccagtacatgagaagaaaaaaccatactcatcaacaagacatcgatgatctcaaacggcagaacgctttgctcgagcagcaggtgcgcgcactggaaaaagctcgatcctccgcc

SEQ ID NO: 33493 - DNA, 273 bp, synthetic construct
  misc_feature 1..273: note = Description of Artificial Sequence: Synthetic coding sequence
  source 1..273: mol_type = other DNA
atgtctgctgcagataaacgagcacaccacaacgctctggaacggaaacggcgtgaccatattaaagattccttccactccctccgggatagtgttccaagtcttcagggagaaaaagccagtcgcgcccagatcctagataaagctactgagtatattcagtatatgagacgcaaaaaccatactcaccagcaggatatcgatgacctgaaacgccagaatgccctcctagaacagcaggttagagctctagaaaaagctcgatcatccgca

SEQ ID NO: 33494 - DNA, 273 bp, synthetic construct
  misc_feature 1..273: note = Description of Artificial Sequence: Synthetic coding sequence
  source 1..273: mol_type = other DNA
atgagtgctgctgataaacgggcgcatcacaacgccctcgaacgcaaacgacgggaccatataaaggattctttccattccctccgggattcggtcccatcactgcagggagagaaagcctcaagggcccagatcctggataaagctactgaatacatacagtacatgagaaggaaaaatcacacacatcagcaggatatagatgatctgaaacggcagaacgcactgttagaacagcaggtgagggccctcgaaaaggccagatcttctgcc

SEQ ID NO: 33495 - DNA, 273 bp, synthetic construct
  misc_feature 1..273: note = Description of Artificial Sequence: Synthetic coding sequence
  source 1..273: mol_type = other DNA
atgtccgccgctgataagcgagcgcaccacaatgcgttggagagaaaacggagagatcacattaaagatagctttcacagccttagggacagcgtgccatctcttcagggagaaaaggcatctcgagcccagatcctcgacaaagctaccgagtacatccagtacatgaggaggaagaatcacactcaccagcaagatatcgatgacctcaagaggcagaacgcattgctggagcaacaggtacgagcactcgagaaggccaggagtagcgcc

SEQ ID NO: 33496 - DNA, 273 bp, synthetic construct
  misc_feature 1..273: note = Description of Artificial Sequence: Synthetic coding sequence
  source 1..273: mol_type = other DNA
atgtcagccgcagacaagcgcgcgcatcacaacgctctggagcgcaaacggcgcgatcacattaaggattccttccactctctgagggacagcgtgcctagtctccagggggagaaggcctcacgtgctcagatcctggataaggcaaccgaatacattcagtatatgaggcggaaaaaccatactcatcaacaggatatcgacgacttgaaacgacagaacgcccttctggagcagcaggtgcgggctcttgaaaaggctcggtccagcgct

SEQ ID NO: 33497 - DNA, 273 bp, synthetic construct
  misc_feature 1..273: note = Description of Artificial Sequence: Synthetic coding sequence
  source 1..273: mol_type = other DNA
atgagcgctgctgacaagagagctcaccataatgcattggagcggaagcgacgcgatcatataaaagatagtttccactccctgagagattctgtccccagtctccaaggtgagaaagcctcccgggcccagatcctggataaggcgactgagtacatacaatacatgaggagaaaaaaccatactcaccagcaagacatcgacgacttgaagcggcagaatgccctgctggagcagcaagtccgcgcgctggagaaagcccggagttccgca

SEQ ID NO: 33498 - DNA, 273 bp, synthetic construct
  misc_feature 1..273: note = Description of Artificial Sequence: Synthetic coding sequence
  source 1..273: mol_type = other DNA
atgtctgccgcagataaaagggcccaccacaatgcactagagagaaaacgccgcgatcacatcaaggactcattccacagtcttcgtgactctgttccatctcttcagggggaaaaagcgtcacgggcacagatcctcgataaagccactgaatatattcagtacatgcggcgaaaaaaccacacacaccagcaggatattgacgaccttaaacggcagaacgcccttttagaacagcaagtgcgggctctggaaaaagccagatcaagtgca

SEQ ID NO: 33499 - DNA, 273 bp, synthetic construct
  misc_feature 1..273: note = Description of Artificial Sequence: Synthetic coding sequence
  source 1..273: mol_type = other DNA
atgagcgctgctgacaaacgagctcatcataacgcactcgaacggaaacgccgcgaccacatcaaagattcctttcattcattgcgggacagcgttccttccttgcaaggggagaaggcaagccgagcgcaaatcttggataaagcaacagagtacatccagtatatgaggagaaagaatcacacacatcaacaggacatcgacgatctgaagcgccagaatgccctcctggaacaacaagttcgggccctggagaaggcaagaagtagcgcc

SEQ ID NO: 33500 - DNA, 273 bp, synthetic construct
  misc_feature 1..273: note = Description of Artificial Sequence: Synthetic coding sequence
  source 1..273: mol_type = other DNA
atgagtgctgctgacaagagagcccaccataacgcgctagaacgaaaaagaagggatcacataaaggacagctttcacagcctgcgcgattctgtgccaagtctgcaaggggagaaagcatccagggcacagatcctggataaggctactgaatacatacaatacatgcgacgcaaaaaccatacccaccaacaagacatcgatgatctgaagagacaaaacgccctcctggagcagcaagtccgcgccctggagaaggcgaggtctagcgcc

SEQ ID NO: 33501 - DNA, 273 bp, synthetic construct
  misc_feature 1..273: note = Description of Artificial Sequence: Synthetic coding sequence
  source 1..273: mol_type = other DNA
atgtctgcggctgacaaacgcgcacaccataacgctctcgaacgcaagagacgcgatcatattaaggactcatttcacagtctccgggacagtgtcccatctctgcagggggagaaggctagcagggcgcaaatcctggataaggccactgaatacatccagtacatgcggcgtaaaaatcatacgcatcaacaggatatagatgatctgaaaaggcagaatgccctcctcgaacaacaggtgcgggctttagagaaagccagatcaagtgct

SEQ ID NO: 33502 - DNA, 273 bp, synthetic construct
  misc_feature 1..273: note = Description of Artificial Sequence: Synthetic coding sequence
  source 1..273: mol_type = other DNA
atgtctgcagcagacaagcgcgctcaccataacgccctggaaagaaaaagaagggaccatataaaggattcttttcactccttgcgggattccgtcccctccctgcagggagaaaaggcctcaagagcacaaattctagataaggcaacggaatacatacaatacatgcgtaggaaaaatcatacacaccagcaggatattgacgatttgaagagacaaaacgccctccttgaacagcaggtcagggccctggaaaaggctaggagcagtgct

SEQ ID NO: 33503 - DNA, 273 bp, synthetic construct
  misc_feature 1..273: note = Description of Artificial Sequence: Synthetic coding sequence
  source 1..273: mol_type = other DNA
atgtccgcagctgataagcgcgcccatcataatgcactggaaagaaaacgacgagatcatataaaagattcattccactctctacgagattcagtgccttccctgcagggggaaaaggcctctagggcccaaatcctcgataaggccacagaatatatacagtatatgcggaggaaaaatcacacacaccagcaggatatcgatgatctcaaaaggcagaacgctttactagagcagcaagtccgggcattagaaaaagctcggtcatccgcc

SEQ ID NO: 33504 - DNA, 273 bp, synthetic construct
  misc_feature 1..273: note = Description of Artificial Sequence: Synthetic coding sequence
  source 1..273: mol_type = other DNA
atgagcgccgctgacaaacgggcgcatcacaacgccctcgaaaggaagcgacgtgatcacattaaagacagttttcattcgctgcgcgactctgtaccatccttgcagggcgagaaagcatcacgcgctcagatcctagacaaggctactgaatatatccagtatatgagaaggaaaaatcatacacaccagcaggatattgatgatctcaagagacaaaacgccctcctggagcaacaagtgcgcgccctggagaaggcacggtccagtgcg

SEQ ID NO: 33505 - DNA, 273 bp, synthetic construct
  misc_feature 1..273: note = Description of Artificial Sequence: Synthetic coding sequence
  source 1..273: mol_type = other DNA
atgtcagcggccgataagcgggcccaccacaacgcactggaaaggaagcgacgggatcacatcaaggatagtttccactctttgcgagattctgtcccatctctgcaaggtgagaaggcttctagagcccagatcctcgacaaagcgacggagtacattcagtatatgcgacggaagaatcacacgcaccaacaggatatcgacgatctgaagaggcaaaatgcactgctggagcagcaggtccgtgcccttgaaaaagccagaagtagtgcg

SEQ ID NO: 33506 - DNA, 273 bp, synthetic construct
  misc_feature 1..273: note = Description of Artificial Sequence: Synthetic coding sequence
  source 1..273: mol_type = other DNA
atgagtgctgcagacaagcgggctcaccacaacgccctggaaagaaagcgccgagaccatatcaaggacagcttccatagcctcagggattccgtacctagtttacagggggagaaggcatcccgggctcagattctagacaaggcgacggaatatattcagtatatgaggcgcaaaaaccacacacaccaacaagacatcgatgacctaaaacgtcaaaacgccctcctggagcaacaggtacgggctcttgagaaagccaggtcttcagcc

SEQ ID NO: 33507 - DNA, 273 bp, synthetic construct
  misc_feature 1..273: note = Description of Artificial Sequence: Synthetic coding sequence
  source 1..273: mol_type = other DNA
atgtcggccgcagacaaacgggcccaccataacgctttggaaaggaaaaggcgggatcacatcaaagattccttccattccctccgcgattccgttcctagtcttcagggcgagaaggcctcccgcgcccaaattctagacaaggctaccgagtatatccagtatatgcgcaggaaaaatcacacgcaccagcaggacatcgacgaccttaagcgccaaaacgccctcctggaacagcaggtccgggcgttggagaaagcaaggtcttctgcc

SEQ ID NO: 33508 - DNA, 273 bp, synthetic construct
  misc_feature 1..273: note = Description of Artificial Sequence: Synthetic coding sequence
  source 1..273: mol_type = other DNA
atgtctgcggcggataaacgggcccaccataacgccctggaaaggaaaaggagagaccacataaaagattcatttcattcattacgggattctgtgccaagtctgcagggagaaaaggcaagtagagcccagatacttgacaaagcaacagagtacatccaatacatgcgcaggaaaaaccacactcaccagcaggatatagacgatctaaaaaggcagaacgcgctcctcgaacaacaggtgagggccctggaaaaagcacggtcgtcagct

SEQ ID NO: 33509 - DNA, 273 bp, synthetic construct
  misc_feature 1..273: note = Description of Artificial Sequence: Synthetic coding sequence
  source 1..273: mol_type = other DNA
atgagtgccgccgacaaacgcgcacatcataacgcactggaacgaaagcggagggatcacatcaaggacagcttccatagtctgcgcgacagtgtcccatccctccagggagagaaggcttcacgggctcagatcctggataaggccacagaatatatacaatacatgcgaagaaaaaatcatacccaccaacaggacatcgatgatctgaaaaggcagaacgccctcctcgagcagcaggtccgcgcccttgagaaggccaggtcctctgcg

SEQ ID NO: 33510 - DNA, 273 bp, synthetic construct
  misc_feature 1..273: note = Description of Artificial Sequence: Synthetic coding sequence
  source 1..273: mol_type = other DNA
atgagcgctgccgacaagcgagcacaccacaacgccctggagcggaaaagacgggatcacattaaagacagcttccactccctccgcgattccgtcccttccctgcagggcgaaaaagccagtcgggcgcaaatcctggataaggcaaccgaatatatccagtacatgagacgaaagaatcacacacaccagcaggacatcgacgatctcaaacggcagaatgcactgcttgagcagcaagttagagccctggagaaggccagatctagtgcg

SEQ ID NO: 33511 - DNA, 273 bp, synthetic construct
  misc_feature 1..273: note = Description of Artificial Sequence: Synthetic coding sequence
  source 1..273: mol_type = other DNA
atgagcgccgccgataaaagggcccaccacaacgccctggagaggaaaagacgggaccacatcaaggactcttttcattcactgagggactcagtgcccagcctccagggcgaaaaggcgagccgcgcacagatcctggacaaggcgactgagtatattcaatacatgagacgtaaaaaccatacccaccaacaggatatcgatgacctcaaacggcagaacgcacttcttgagcagcaggtgagggctctcgaaaaggcccgctcatctgct

SEQ ID NO: 33512 - DNA, 273 bp, synthetic construct
  misc_feature 1..273: note = Description of Artificial Sequence: Synthetic coding sequence
  source 1..273: mol_type = other DNA
atgtccgcagcagataaaagggcacatcacaacgccctggagaggaagcggcgtgatcatatcaaagactcattccatagcctgagggatagcgtacccagcctgcaaggggaaaaggctagccgagctcaaattcttgacaaagctactgagtacattcagtacatgcgtaggaagaatcacacccatcagcaggatatagacgacctaaaaagacaaaatgctcttctcgaacagcaggtgcgcgccctggagaaggccaggtcctccgcc

SEQ ID NO: 33513 - DNA, 273 bp, synthetic construct
  misc_feature 1..273: note = Description of Artificial Sequence: Synthetic coding sequence
  source 1..273: mol_type = other DNA
atgagtgcagctgataagcgggcccatcacaatgcgttggagcgaaaaagaagagaccacatcaaagattcatttcattcacttcgggattccgtaccctcgctgcagggagagaaagcgagccgggctcaaatcctggataaggctacagagtacattcaatatatgcgccgaaaaaatcacacacaccagcaggatattgatgacctcaaacgccagaacgcgttgttggagcagcaggtgagagctttagagaaggcccgctcctccgct

SEQ ID NO: 33514 - DNA, 273 bp, synthetic construct
  misc_feature 1..273: note = Description of Artificial Sequence: Synthetic coding sequence
  source 1..273: mol_type = other DNA
atgagtgctgccgacaaacgtgcccaccacaacgccctggaaaggaaaaggcgtgaccacattaaagatagtttccattctttgcgggacagcgtgccctctcttcaaggcgagaaggcatcaagagctcagattctcgataaggcaactgaatacattcagtacatgaggaggaaaaaccacacacaccaacaggatatcgacgatctgaagcgtcagaacgcattgctggagcagcaggtgagagcccttgaaaaagctcgctcaagcgct

SEQ ID NO: 33515 - DNA, 273 bp, synthetic construct
  misc_feature 1..273: note = Description of Artificial Sequence: Synthetic coding sequence
  source 1..273: mol_type = other DNA
atgagtgccgcggacaaacgtgcccaccacaatgctctagagaggaaacgtcgggatcacataaaggactccttccatagcttgcgggactcagtgccctctctccagggcgaaaaagcaagccgcgcccagatcctcgacaaagctaccgagtatatccaatatatgagacgaaaaaaccatacgcatcagcaggacatcgacgacctcaaacggcagaatgcactgctcgagcagcaggtcagggccctggaaaaggcccgatccagtgcg

SEQ ID NO: 33516 - DNA, 273 bp, synthetic construct
  misc_feature 1..273: note = Description of Artificial Sequence: Synthetic coding sequence
  source 1..273: mol_type = other DNA
atgagcgcggcagacaaacgggcccatcataacgccttagagagaaagcgaagggaccacattaaagatagttttcacagtttgcgggacagtgttccctctttacagggcgagaaagcatctcgcgcgcagattctcgataaggccacagagtatattcagtatatgcgacggaaaaaccatactcaccagcaggacattgatgaccttaaacgtcagaatgccttgctggagcagcaagtccgagcactggagaaagcacgctcctcagct

SEQ ID NO: 33517 - DNA, 273 bp, synthetic construct
  misc_feature 1..273: note = Description of Artificial Sequence: Synthetic coding sequence
  source 1..273: mol_type = other DNA
atgtctgccgccgacaaaagggcccaccataacgccctggaaagaaaaagaagagatcacattaaagattctttccactccctgagagattccgtgccaagtcttcagggggaaaaggcaagtcgggcacagatactggataaggccactgaatatattcagtacatgagacgcaagaatcacactcaccagcaggatatagatgacctgaaacgccaaaacgcgctcctcgagcagcaagtacgggccctggaaaaagcacgctcctctgca

SEQ ID NO: 33518 - DNA, 273 bp, synthetic construct
  misc_feature 1..273: note = Description of Artificial Sequence: Synthetic coding sequence
  source 1..273: mol_type = other DNA
atgagcgccgccgacaaaagagcccaccacaatgctctcgagagaaagcggagagatcatatcaaagacagcttccatagtcttcgggacagcgtcccatccctccagggcgagaaagcctcacgggcacagatccttgataaggcaacagaatacatacagtacatgaggcgcaagaaccacactcaccagcaggacattgatgacctgaaacgacagaatgcgctgttggaacagcaggtgagagctttggagaaggcccggagctccgcc

SEQ ID NO: 33519 - DNA, 273 bp, synthetic construct
  misc_feature 1..273: note = Description of Artificial Sequence: Synthetic coding sequence
  source 1..273: mol_type = other DNA
atgtccgcggcggacaaaagggcccaccacaacgcgctcgagaggaagagacgagaccacataaaggactcattccacagcctccgggattctgtacccagtctccagggggagaaggcatcccgcgctcagatcctggataaggctacagagtacatccaatatatgagaaggaaaaatcacacacaccagcaggacattgacgacctcaaacgacagaacgcgctgctcgagcaacaagtgcgggcccttgagaaagcacggagttctgcc

SEQ ID NO: 33520 - DNA, 273 bp, synthetic construct
  misc_feature 1..273: note = Description of Artificial Sequence: Synthetic coding sequence
  source 1..273: mol_type = other DNA
atgagcgccgcagataaacgcgctcatcataacgccctcgaacggaagaggagggaccacatcaaggactcctttcactctctgcgagattcggtgcccagcctgcagggggagaaggcctcccgggcccaaattctggacaaagcgaccgaatacatacagtacatgcggcggaaaaaccacacccatcagcaagacatcgatgatctgaagaggcagaacgccttgctcgaacaacaggttagagctctcgagaaagcccgcagctctgct

SEQ ID NO: 33521 - DNA, 273 bp, synthetic construct
  misc_feature 1..273: note = Description of Artificial Sequence: Synthetic coding sequence
  source 1..273: mol_type = other DNA
atgtctgccgccgataagagagcccaccacaatgccctagaacggaagcgcagagaccacataaaagatagcttccattcgctcagagacagcgtgccttccctgcagggtgaaaaggcgtccagggctcagattctcgataaggccaccgaatacattcagtatatgaggcggaaaaaccacacgcaccaacaggatatcgatgacctgaagcgtcagaacgcgctgttagaacagcaagtgcgcgccctggagaaggcacggtcaagcgcc

SEQ ID NO: 33522 - DNA, 273 bp, synthetic construct
  misc_feature 1..273: note = Description of Artificial Sequence: Synthetic coding sequence
  source 1..273: mol_type = other DNA
atgagcgccgccgataaaagggcccaccacaacgccttggaaaggaaaagaagggatcacataaaggactcattccattcccttagagattcagtgccatctctgcagggcgagaaggcttccagagcccaaatcctggacaaggctacggagtatatccagtacatgcgcagaaagaaccacacccatcagcaggatattgacgatcttaagagacagaacgcacttttggagcaacaggtgcgagcgctggagaaagcgcgcagctccgcc

SEQ ID NO: 33523 - DNA, 273 bp, synthetic construct
  misc_feature 1..273: note = Description of Artificial Sequence: Synthetic coding sequence
  source 1..273: mol_type = other DNA
atgagcgccgccgacaagcgcgctcaccacaacgcactggagaggaaaaggagggaccacatcaaagactcattccacagtctcagggactcggttcccagtctgcagggcgagaaggcgtcccgggcacagattctggataaagccactgaatacattcaatacatgcgtagaaagaaccacacccatcagcaggacattgacgacctcaaacggcagaatgccttgttagaacagcaggtgcgtgcattggagaaagcacgttcatctgca

SEQ ID NO: 33524 - DNA, 273 bp, synthetic construct
  misc_feature 1..273: note = Description of Artificial Sequence: Synthetic coding sequence
  source 1..273: mol_type = other DNA
atgtcggcagcggacaagagggctcaccataacgcgctggaaagaaaaagaagagatcatattaaagacagcttccacagtctcagggactctgtgcccagcctacagggagagaaagcaagcagagctcagatcctcgataaagctacagaatatatccagtacatgagaaggaaaaatcacacccaccaacaggacattgacgatctcaagcgccagaacgcccttctcgagcagcaagtccgggccctcgaaaaggcccggagttccgcg

SEQ ID NO: 33525 - DNA, 273 bp, synthetic construct
  misc_feature 1..273: note = Description of Artificial Sequence: Synthetic coding sequence
  source 1..273: mol_type = other DNA
atgagcgccgcagataagagggcccaccacaacgctctagagaggaagcgtagggaccatatcaaagatagttttcactcactccgggattcagtcccttccctgcaaggggaaaaagcctccagggcacagatactggataaagcaaccgagtatattcaatacatgcgcaggaagaaccatacccatcagcaggatattgatgacctcaagagacagaatgcccttcttgaacaacaggttcgcgctctggagaaggcgagatcaagcgcc

SEQ ID NO: 33526 - DNA, 273 bp, synthetic construct
  misc_feature 1..273: note = Description of Artificial Sequence: Synthetic coding sequence
  source 1..273: mol_type = other DNA
atgtccgccgcagacaagagggcacatcacaacgcacttgaacgcaagaggcgcgaccatatcaaggatagctttcatagcctccgggactcagtcccgagcctccagggcgagaaagcctctcgcgcacaaattcttgacaaagctactgagtacattcagtacatgcggcgaaagaatcacacccatcagcaagacatcgacgatctgaaacgtcagaacgccctgctcgaacagcaggtcagggcattggaaaaagctcggtccagcgca

SEQ ID NO: 33527 - DNA, 273 bp, synthetic construct
  misc_feature 1..273: note = Description of Artificial Sequence: Synthetic coding sequence
  source 1..273: mol_type = other DNA
atgtccgccgccgataagagggcccatcacaatgccttggagagaaaacggcgggatcatattaaagattctttccatagcttgcgcgatagcgtaccgtctctccagggggagaaggcaagccgggcacagatattggataaggcgactgagtatattcaatacatgcgacggaagaatcatacacatcaacaggacatcgacgatctcaaacggcagaacgccctgcttgagcagcaggttcgcgctctcgagaaagcgcggtccagtgcc

SEQ ID NO: 33528 - DNA, 273 bp, synthetic construct
  misc_feature 1..273: note = Description of Artificial Sequence: Synthetic coding sequence
  source 1..273: mol_type = other DNA
atgtccgccgccgacaaacgcgcacatcacaacgcccttgagaggaagagaagagaccatattaaagattcgttccacagcttgagggacagcgtcccttccctccaaggcgagaaggccagcagagctcagatactcgacaaggccacagagtacatacagtacatgagaagaaaaaaccacacacaccaacaggacattgatgatctgaaacgccagaatgcactgctggaacagcaggtgcgggccttggaaaaggcaaggagctccgct

SEQ ID NO: 33529 - DNA, 273 bp, synthetic construct
  misc_feature 1..273: note = Description of Artificial Sequence: Synthetic coding sequence
  source 1..273: mol_type = other DNA
atgagcgccgctgataagcgcgctcatcataatgcgctcgagaggaaaagaagggaccacattaaagattcttttcacagtctgcgcgactccgttccatccctgcagggagagaaggccagcagagcccaaatactggacaaagccaccgagtatatacagtacatgcggaggaagaaccatacccatcagcaggatatagatgatctgaagaggcagaacgccctgttggagcagcaggtacgcgctttggagaaggcaagatcatcagcc

SEQ ID NO: 33530 - DNA, 273 bp, synthetic construct
  misc_feature 1..273: note = Description of Artificial Sequence: Synthetic coding sequence
  source 1..273: mol_type = other DNA
atgagcgctgctgacaagcgcgcccatcataacgctctagaaaggaaaaggcgggatcatattaaagacagtttccactcacttagagactctgtccctagcctgcaaggggagaaagctagccgagctcaaatccttgacaaagcgaccgagtatatccagtacatgcgacgtaagaatcacacacatcaacaggatattgatgacctaaagcgacagaacgcactgttggaacaacaggttagagcactcgagaaggctaggtcttccgct

SEQ ID NO: 33531 - DNA, 273 bp, synthetic construct
  misc_feature 1..273: note = Description of Artificial Sequence: Synthetic coding sequence
  source 1..273: mol_type = other DNA
atgagcgccgccgacaagagagcccaccataacgctctggaacgaaagcgccgagatcatatcaaagattcattccactctttgcgggattcagtgccctctctccagggcgaaaaggcaagccgggcgcagatcctggacaaggccaccgaatatatacagtatatgaggcgcaaaaatcacactcatcaacaagatatagatgatttgaaacgacaaaacgcgctgcttgagcagcaggtgagagccttggagaaagcacgcagtagcgcc

SEQ ID NO: 33532 - DNA, 273 bp, synthetic construct
  misc_feature 1..273: note = Description of Artificial Sequence: Synthetic coding sequence
  source 1..273: mol_type = other DNA
atgtcggctgctgacaagagggcacatcataacgctttggagaggaagagacgcgatcacatcaaagatagcttccactcattgagggattcggtcccaagtctgcagggagagaaggcctcacgtgcccaaatcctggataaggccactgagtatattcagtacatgcgcagaaagaatcatactcaccagcaggatatagacgacctgaagcggcaaaatgctctcctggagcagcaagtgagggcccttgagaaagctagatcttctgcc

SEQ ID NO: 33533 - DNA, 273 bp, synthetic construct
  misc_feature 1..273: note = Description of Artificial Sequence: Synthetic coding sequence
  source 1..273: mol_type = other DNA
atgagcgctgccgataagcgtgcccaccataacgctctggaacggaaaaggcgcgatcacataaaggacagcttccatagcctgagagacagtgtcccatcgcttcaaggggaaaaggcctcacgagctcaaattctggataaagccacggagtacattcagtatatgcggcggaaaaatcatacacatcaacaggatatcgacgacctgaaacggcagaacgcgctccttgagcagcaggtccgcgccctcgaaaaagctcgctcctctgcg

SEQ ID NO: 33534 - DNA, 273 bp, synthetic construct
  misc_feature 1..273: note = Description of Artificial Sequence: Synthetic coding sequence
  source 1..273: mol_type = other DNA
atgtcagccgccgataaacgtgctcatcataacgctcttgaaagaaagagacgcgatcatattaaagattctttccactcccttagagattctgtgccctctctgcagggggaaaaagcaagtagagctcagatactagataaagctacagaatatatccagtacatgcggagaaaaaatcatactcaccagcaagatatagatgatctaaaaagacagaatgcattgctggaacagcaggtaagagccctggagaaagcaaggtcctcagcg

SEQ ID NO: 33535 - DNA, 1434 bp, synthetic construct; identical to SEQ ID NO: 32528
  misc_feature 1..1434: note = Description of Artificial Sequence: Synthetic coding sequence
  source 1..1434: mol_type = other DNA

SEQ ID NO: 33536 - DNA, 1434 bp, synthetic construct; identical to SEQ ID NO: 32529
  misc_feature 1..1434: note = Description of Artificial Sequence: Synthetic coding sequence
  source 1..1434: mol_type = other DNA

SEQ ID NO: 33537 - DNA, 1434 bp, synthetic construct; identical to SEQ ID NO: 32530
  misc_feature 1..1434: note = Description of Artificial Sequence: Synthetic coding sequence
  source 1..1434: mol_type = other DNA

SEQ ID NO: 33538 - DNA, 1434 bp, synthetic construct; identical to SEQ ID NO: 32531
  misc_feature 1..1434: note = Description of Artificial Sequence: Synthetic coding sequence
  source 1..1434: mol_type = other DNA

SEQ ID NO: 33539 - DNA, 1434 bp, synthetic construct; identical to SEQ ID NO: 32532
  misc_feature 1..1434: note = Description of Artificial Sequence: Synthetic coding sequence
  source 1..1434: mol_type = other DNA

SEQ ID NO: 33540 - DNA, 1434 bp, synthetic construct; identical to SEQ ID NO: 32533
  misc_feature 1..1434: note = Description of Artificial Sequence: Synthetic coding sequence
  source 1..1434: mol_type = other DNA

SEQ ID NO: 33541 - DNA, 1434 bp, synthetic construct; identical to SEQ ID NO: 32534
  misc_feature 1..1434: note = Description of Artificial Sequence: Synthetic coding sequence
  source 1..1434: mol_type = other DNA

SEQ ID NO: 33542 - DNA, 1434 bp, synthetic construct; identical to SEQ ID NO: 32535
  misc_feature 1..1434: note = Description of Artificial Sequence: Synthetic coding sequence
  source 1..1434: mol_type = other DNA

SEQ ID NO: 33543 - DNA, 1434 bp, synthetic construct; identical to SEQ ID NO: 32536
  misc_feature 1..1434: note = Description of Artificial Sequence: Synthetic coding sequence
  source 1..1434: mol_type = other DNA

SEQ ID NO: 33544 - DNA, 1434 bp, synthetic construct; identical to SEQ ID NO: 32537
  misc_feature 1..1434: note = Description of Artificial Sequence: Synthetic coding sequence
  source 1..1434: mol_type = other DNA

SEQ ID NO: 33545 - DNA, 1434 bp, synthetic construct; identical to SEQ ID NO: 32538
  misc_feature 1..1434: note = Description of Artificial Sequence: Synthetic coding sequence
  source 1..1434: mol_type = other DNA

SEQ ID NO: 33546 - DNA, 1434 bp, synthetic construct; identical to SEQ ID NO: 32539
  misc_feature 1..1434: note = Description of Artificial Sequence: Synthetic coding sequence
  source 1..1434: mol_type = other DNA

SEQ ID NO: 33547 - DNA, 1434 bp, synthetic construct; identical to SEQ ID NO: 32540
  misc_feature 1..1434: note = Description of Artificial Sequence: Synthetic coding sequence
  source 1..1434: mol_type = other DNA

SEQ ID NO: 33548 - DNA, 1434 bp, synthetic construct; identical to SEQ ID NO: 32541
  misc_feature 1..1434: note = Description of Artificial Sequence: Synthetic coding sequence
  source 1..1434: mol_type = other DNA

SEQ ID NO: 33549 - DNA, 1434 bp, synthetic construct; identical to SEQ ID NO: 32542
  misc_feature 1..1434: note = Description of Artificial Sequence: Synthetic coding sequence
  source 1..1434: mol_type = other DNA

SEQ ID NO: 33550 - DNA, 1434 bp, synthetic construct; identical to SEQ ID NO: 32543
  misc_feature 1..1434: note = Description of Artificial Sequence: Synthetic coding sequence
  source 1..1434: mol_type = other DNA

SEQ ID NO: 33551 - DNA, 1434 bp, synthetic construct; identical to SEQ ID NO: 32544
  misc_feature 1..1434: note = Description of Artificial Sequence: Synthetic coding sequence
  source 1..1434: mol_type = other DNA

SEQ ID NO: 33552 - DNA, 1434 bp, synthetic construct; identical to SEQ ID NO: 32545
  misc_feature 1..1434: note = Description of Artificial Sequence: Synthetic coding sequence
  source 1..1434: mol_type = other DNA

SEQ ID NO: 33553 - DNA, 1434 bp, synthetic construct; identical to SEQ ID NO: 32546
  misc_feature 1..1434: note = Description of Artificial Sequence: Synthetic coding sequence
  source 1..1434: mol_type = other DNA

SEQ ID NO: 33554 - DNA, 1434 bp, synthetic construct; identical to SEQ ID NO: 32547
  misc_feature 1..1434: note = Description of Artificial Sequence: Synthetic coding sequence
  source 1..1434: mol_type = other DNA

SEQ ID NO: 33555 - DNA, 1434 bp, synthetic construct; identical to SEQ ID NO: 32548
  misc_feature 1..1434: note = Description of Artificial Sequence: Synthetic coding sequence
  source 1..1434: mol_type = other DNA

SEQ ID NO: 33556 - DNA, 1434 bp, synthetic construct; identical to SEQ ID NO: 32549
  misc_feature 1..1434: note = Description of Artificial Sequence: Synthetic coding sequence
  source 1..1434: mol_type = other DNA

SEQ ID NO: 33557 - DNA, 1434 bp, synthetic construct; identical to SEQ ID NO: 32550
  misc_feature 1..1434: note = Description of Artificial Sequence: Synthetic coding sequence
  source 1..1434: mol_type = other DNA

SEQ ID NO: 33558 - DNA, 1434 bp, synthetic construct; identical to SEQ ID NO: 32551
  misc_feature 1..1434: note = Description of Artificial Sequence: Synthetic coding sequence
  source 1..1434: mol_type = other DNA

SEQ ID NO: 33559 - DNA, 1434 bp, synthetic construct; identical to SEQ ID NO: 32552
  misc_feature 1..1434: note = Description of Artificial Sequence: Synthetic coding sequence
  source 1..1434: mol_type = other DNA

SEQ ID NO: 33560 - DNA, 1434 bp, synthetic construct; identical to SEQ ID NO: 32553
  misc_feature 1..1434: note = Description of Artificial Sequence: Synthetic coding sequence
  source 1..1434: mol_type = other DNA

SEQ ID NO: 33561 - DNA, 1434 bp, synthetic construct; identical to SEQ ID NO: 32554
  misc_feature 1..1434: note = Description of Artificial Sequence: Synthetic coding sequence
  source 1..1434: mol_type = other DNA

SEQ ID NO: 33562 - DNA, 1434 bp, synthetic construct; identical to SEQ ID NO: 32555
  misc_feature 1..1434: note = Description of Artificial Sequence: Synthetic coding sequence
  source 1..1434: mol_type = other DNA

SEQ ID NO: 33563 - DNA, 1434 bp, synthetic construct; identical to SEQ ID NO: 32556
  misc_feature 1..1434: note = Description of Artificial Sequence: Synthetic coding sequence
  source 1..1434: mol_type = other DNA

SEQ ID NO: 33564 - DNA, 1434 bp, synthetic construct; identical to SEQ ID NO: 32557
  misc_feature 1..1434: note = Description of Artificial Sequence: Synthetic coding sequence
  source 1..1434: mol_type = other DNA

SEQ ID NO: 33565 - DNA, 1434 bp, synthetic construct; identical to SEQ ID NO: 32558
  misc_feature 1..1434: note = Description of Artificial Sequence: Synthetic coding sequence
  source 1..1434: mol_type = other DNA

SEQ ID NO: 33566 - DNA, 1434 bp, synthetic construct; identical to SEQ ID NO: 32559
  misc_feature 1..1434: note = Description of Artificial Sequence: Synthetic coding sequence
  source 1..1434: mol_type = other DNA

SEQ ID NO: 33567 - DNA, 1434 bp, synthetic construct; identical to SEQ ID NO: 32560
  misc_feature 1..1434: note = Description of Artificial Sequence: Synthetic coding sequence
  source 1..1434: mol_type = other DNA

SEQ ID NO: 33568 - DNA, 1434 bp, synthetic construct; identical to SEQ ID NO: 32561
  misc_feature 1..1434: note = Description of Artificial Sequence: Synthetic coding sequence
  source 1..1434: mol_type = other DNA

SEQ ID NO: 33569 - DNA, 1434 bp, synthetic construct; identical to SEQ ID NO: 32562
  misc_feature 1..1434: note = Description of Artificial Sequence: Synthetic coding sequence
  source 1..1434: mol_type = other DNA

SEQ ID NO: 33570 - DNA, 1434 bp, synthetic construct; identical to SEQ ID NO: 32563
  misc_feature 1..1434: note = Description of Artificial Sequence: Synthetic coding sequence
  source 1..1434: mol_type = other DNA

SEQ ID NO: 33571 - DNA, 1434 bp, synthetic construct; identical to SEQ ID NO: 32564
  misc_feature 1..1434: note = Description of Artificial Sequence: Synthetic coding sequence
  source 1..1434: mol_type = other DNA

SEQ ID NO: 33572 - DNA, 1434 bp, synthetic construct; identical to SEQ ID NO: 32565
  misc_feature 1..1434: note = Description of Artificial Sequence: Synthetic coding sequence
  source 1..1434: mol_type = other DNA

SEQ ID NO: 33573 - DNA, 1434 bp, synthetic construct; identical to SEQ ID NO: 32566
  misc_feature 1..1434: note = Description of Artificial Sequence: Synthetic coding sequence
  source 1..1434: mol_type = other DNA

SEQ ID NO: 33574 - DNA, 1434 bp, synthetic construct; identical to SEQ ID NO: 32567
  misc_feature 1..1434: note = Description of Artificial Sequence: Synthetic coding sequence
  source 1..1434: mol_type = other DNA

SEQ ID NO: 33575 - DNA, 1434 bp, synthetic construct; identical to SEQ ID NO: 32568
  misc_feature 1..1434: note = Description of Artificial Sequence: Synthetic coding sequence
  source 1..1434: mol_type = other DNA

SEQ ID NO: 33576 - DNA, 1434 bp, synthetic construct; identical to SEQ ID NO: 32569
  misc_feature 1..1434: note = Description of Artificial Sequence: Synthetic coding sequence
  source 1..1434: mol_type = other DNA

SEQ ID NO: 33577 - DNA, 1434 bp, synthetic construct; identical to SEQ ID NO: 32570
  misc_feature 1..1434: note = Description of Artificial Sequence: Synthetic coding sequence
  source 1..1434: mol_type = other DNA

SEQ ID NO: 33578 - DNA, 1434 bp, synthetic construct; identical to SEQ ID NO: 32571
  misc_feature 1..1434: note = Description of Artificial Sequence: Synthetic coding sequence
  source 1..1434: mol_type = other DNA

SEQ ID NO: 33579 - DNA, 1434 bp, synthetic construct; identical to SEQ ID NO: 32572
  misc_feature 1..1434: note = Description of Artificial Sequence: Synthetic coding sequence
  source 1..1434: mol_type = other DNA

SEQ ID NO: 33580 - DNA, 1434 bp, synthetic construct; identical to SEQ ID NO: 32573
  misc_feature 1..1434: note = Description of Artificial Sequence: Synthetic coding sequence
  source 1..1434: mol_type = other DNA

SEQ ID NO: 33581 - DNA, 1434 bp, synthetic construct; identical to SEQ ID NO: 32574
  misc_feature 1..1434: note = Description of Artificial Sequence: Synthetic coding sequence
  source 1..1434: mol_type = other DNA

SEQ ID NO: 33582 - DNA, 1434 bp, synthetic construct; identical to SEQ ID NO: 32575
  misc_feature 1..1434: note = Description of Artificial Sequence: Synthetic coding sequence
  source 1..1434: mol_type = other DNA

SEQ ID NO: 33583 - DNA, 1434 bp, synthetic construct; identical to SEQ ID NO: 32576
  misc_feature 1..1434: note = Description of Artificial Sequence: Synthetic coding sequence
  source 1..1434: mol_type = other DNA

SEQ ID NO: 33584 - DNA, 1434 bp, synthetic construct; identical to SEQ ID NO: 32577
  misc_feature 1..1434: note = Description of Artificial Sequence: Synthetic coding sequence
  source 1..1434: mol_type = other DNA

SEQ ID NO: 33585 - DNA, 1434 bp, synthetic construct; identical to SEQ ID NO: 32578
  misc_feature 1..1434: note = Description of Artificial Sequence: Synthetic coding sequence
  source 1..1434: mol_type = other DNA

SEQ ID NO: 33586 - DNA, 1434 bp, synthetic construct; identical to SEQ ID NO: 32579
  misc_feature 1..1434: note = Description of Artificial Sequence: Synthetic coding sequence
  source 1..1434: mol_type = other DNA

SEQ ID NO: 33587 - DNA, 1434 bp, synthetic construct; identical to SEQ ID NO: 32580
  misc_feature 1..1434: note = Description of Artificial Sequence: Synthetic coding sequence
  source 1..1434: mol_type = other DNA

SEQ ID NO: 33588 - DNA, 1434 bp, synthetic construct; identical to SEQ ID NO: 32581
  misc_feature 1..1434: note = Description of Artificial Sequence: Synthetic coding sequence
  source 1..1434: mol_type = other DNA

SEQ ID NO: 33589 - DNA, 1434 bp, synthetic construct; identical to SEQ ID NO: 32582
  misc_feature 1..1434: note = Description of Artificial Sequence: Synthetic coding sequence
  source 1..1434: mol_type = other DNA

SEQ ID NO: 33590 - DNA, 1434 bp, synthetic construct; identical to SEQ ID NO: 32583
  misc_feature 1..1434: note = Description of Artificial Sequence: Synthetic coding sequence
  source 1..1434: mol_type = other DNA

SEQ ID NO: 33591 - DNA, 1434 bp, synthetic construct; identical to SEQ ID NO: 32584
  misc_feature 1..1434: note = Description of Artificial Sequence: Synthetic coding sequence
  source 1..1434: mol_type = other DNA

SEQ ID NO: 33592 - DNA, 1434 bp, synthetic construct; identical to SEQ ID NO: 32585
  misc_feature 1..1434: note = Description of Artificial Sequence: Synthetic coding sequence
  source 1..1434: mol_type = other DNA

SEQ ID NO: 33593 - DNA, 1434 bp, synthetic construct; identical to SEQ ID NO: 32586
  misc_feature 1..1434: note = Description of Artificial Sequence: Synthetic coding sequence
  source 1..1434: mol_type = other DNA

SEQ ID NO: 33594 - DNA, 1434 bp, synthetic construct; identical to SEQ ID NO: 32587
  misc_feature 1..1434: note = Description of Artificial Sequence: Synthetic coding sequence
  source 1..1434: mol_type = other DNA

SEQ ID NO: 33595 - DNA, 1434 bp, synthetic construct; identical to SEQ ID NO: 32588
  misc_feature 1..1434: note = Description of Artificial Sequence: Synthetic coding sequence
  source 1..1434: mol_type = other DNA

SEQ ID NO: 33596 - DNA, 1434 bp, synthetic construct; identical to SEQ ID NO: 32589
  misc_feature 1..1434: note = Description of Artificial Sequence: Synthetic coding sequence
  source 1..1434: mol_type = other DNA

SEQ ID NO: 33597 - DNA, 1434 bp, synthetic construct; identical to SEQ ID NO: 32590
  misc_feature 1..1434: note = Description of Artificial Sequence: Synthetic coding sequence
  source 1..1434: mol_type = other DNA

SEQ ID NO: 33598 - DNA, 1434 bp, synthetic construct; identical to SEQ ID NO: 32591
  misc_feature 1..1434: note = Description of Artificial Sequence: Synthetic coding sequence
  source 1..1434: mol_type = other DNA

SEQ ID NO: 33599 - DNA, 1434 bp, synthetic construct; identical to SEQ ID NO: 32592
  misc_feature 1..1434: note = Description of Artificial Sequence: Synthetic coding sequence
  source 1..1434: mol_type = other DNA

SEQ ID NO: 33600 - DNA, 1434 bp, synthetic construct; identical to SEQ ID NO: 32593
  misc_feature 1..1434: note = Description of Artificial Sequence: Synthetic coding sequence
  source 1..1434: mol_type = other DNA

SEQ ID NO: 33601 - DNA, 1434 bp, synthetic construct; identical to SEQ ID NO: 32594
  misc_feature 1..1434: note = Description of Artificial Sequence: Synthetic coding sequence
  source 1..1434: mol_type = other DNA

SEQ ID NO: 33602 - DNA, 1434 bp, synthetic construct; identical to SEQ ID NO: 32595
  misc_feature 1..1434: note = Description of Artificial Sequence: Synthetic coding sequence
  source 1..1434: mol_type = other DNA

SEQ ID NO: 33603 - DNA, 1434 bp, synthetic construct; identical to SEQ ID NO: 32596
  misc_feature 1..1434: note = Description of Artificial Sequence: Synthetic coding sequence
  source 1..1434: mol_type = other DNA

SEQ ID NO: 33604 - DNA, 1434 bp, synthetic construct; identical to SEQ ID NO: 32597
  misc_feature 1..1434: note = Description of Artificial Sequence: Synthetic coding sequence
  source 1..1434: mol_type = other DNA

SEQ ID NO: 33605 - DNA, 1434 bp, synthetic construct; identical to SEQ ID NO: 32598
  misc_feature 1..1434: note = Description of Artificial Sequence: Synthetic coding sequence
  source 1..1434: mol_type = other DNA

SEQ ID NO: 33606 - DNA, 1434 bp, synthetic construct; identical to SEQ ID NO: 32599
  misc_feature 1..1434: note = Description of Artificial Sequence: Synthetic coding sequence
  source 1..1434: mol_type = other DNA

SEQ ID NO: 33607 - DNA, 1434 bp, synthetic construct; identical to SEQ ID NO: 32600
  misc_feature 1..1434: note = Description of Artificial Sequence: Synthetic coding sequence
  source 1..1434: mol_type = other DNA

SEQ ID NO: 33608 - DNA, 1434 bp, synthetic construct; identical to SEQ ID NO: 32601
  misc_feature 1..1434: note = Description of Artificial Sequence: Synthetic coding sequence
  source 1..1434: mol_type = other DNA

SEQ ID NO: 33609 - DNA, 1434 bp, synthetic construct; identical to SEQ ID NO: 32602
  misc_feature 1..1434: note = Description of Artificial Sequence: Synthetic coding sequence
  source 1..1434: mol_type = other DNA

SEQ ID NO: 33610 - DNA, 1434 bp, synthetic construct; identical to SEQ ID NO: 32603
  misc_feature 1..1434: note = Description of Artificial Sequence: Synthetic coding sequence
  source 1..1434: mol_type = other DNA

SEQ ID NO: 33611 - DNA, 1434 bp, synthetic construct; identical to SEQ ID NO: 32604
  misc_feature 1..1434: note = Description of Artificial Sequence: Synthetic coding sequence
  source 1..1434: mol_type = other DNA

SEQ ID NO: 33612 - DNA, 1434 bp, synthetic construct; identical to SEQ ID NO: 32605
  misc_feature 1..1434: note = Description of Artificial Sequence: Synthetic coding sequence
  source 1..1434: mol_type = other DNA

SEQ ID NO: 33613 - DNA, 1434 bp, synthetic construct; identical to SEQ ID NO: 32606
  misc_feature 1..1434: note = Description of Artificial Sequence: Synthetic coding sequence
  source 1..1434: mol_type = other DNA

SEQ ID NO: 33614 - DNA, 1434 bp, synthetic construct; identical to SEQ ID NO: 32607
  misc_feature 1..1434: note = Description of Artificial Sequence: Synthetic coding sequence
  source 1..1434: mol_type = other DNA

SEQ ID NO: 33615 - DNA, 1434 bp, synthetic construct; identical to SEQ ID NO: 32599
  misc_feature 1..1434: note = Description of Artificial Sequence: Synthetic coding sequence
  source 1..1434: mol_type = other DNA

SEQ ID NO: 33616 - DNA, 1434 bp, synthetic construct; identical to SEQ ID NO: 32609
  misc_feature 1..1434: note = Description of Artificial Sequence: Synthetic coding sequence
  source 1..1434: mol_type = other DNA

SEQ ID NO: 33617 - DNA, 1434 bp, synthetic construct; identical to SEQ ID NO: 32610
  misc_feature 1..1434: note = Description of Artificial Sequence: Synthetic coding sequence
  source 1..1434: mol_type = other DNA

SEQ ID NO: 33618 - DNA, 1434 bp, synthetic construct; identical to SEQ ID NO: 32611
  misc_feature 1..1434: note = Description of Artificial Sequence: Synthetic coding sequence
  source 1..1434: mol_type = other DNA

SEQ ID NO: 33619 - DNA, 1434 bp, synthetic construct; identical to SEQ ID NO: 32612
  misc_feature 1..1434: note = Description of Artificial Sequence: Synthetic coding sequence
  source 1..1434: mol_type = other DNA

SEQ ID NO: 33620 - DNA, 1434 bp, synthetic construct; identical to SEQ ID NO: 32613
  misc_feature 1..1434: note = Description of Artificial Sequence: Synthetic coding sequence
  source 1..1434: mol_type = other DNA

SEQ ID NO: 33621 - DNA, 1434 bp, synthetic construct; identical to SEQ ID NO: 32614
  misc_feature 1..1434: note = Description of Artificial Sequence: Synthetic coding sequence
  source 1..1434: mol_type = other DNA

SEQ ID NO: 33622 - DNA, 846 bp, synthetic construct
  misc_feature 1..846: note = Description of Artificial Sequence: Synthetic coding sequence
  source 1..846: mol_type = other DNA
atgtcgagacagaccgcaactgccctgccgactggcacctcgaagtgcccgccgtcgcagagggtccccgccctgaccggcaccaccgcatcgaacaacgatctggcatccctcttcgaatgccccgtctgtttcgactacgttctgccccctatcctccagtgccagtcaggacacctcgtctgctcaaattgccggcctaagctcacttgctgccctacctgccggggacccctgggatccatccgcaatctggcgatggaaaaggtagcaaactctgtgctgttcccgtgcaagtacgcaagctccggatgcgagatcacgttgccgcatactgagaaggcggaccacgaggagttgtgcgaatttcgcccgtactcttgcccgtgtcctggcgcttcgtgtaaatggcagggatctttggacgccgtgatgcctcacctcatgcatcaacataaatccatcaccactctgcaaggagaggacatcgtgttcctggcaaccgatatcaatttgccaggagcggtggactgggtgatgatgcaatcatgtttcggttttcacttcatgttggtgctcgaaaagcaagagaagtacgacggtcatcagcagtttttcgccatagtgcaactgatcggcactcgtaaacaggccgagaacttcgcctatcggctggaactgaacggccaccgcaggcggcttacgtgggaagcgaccccgagatcaatccacgaaggaatcgccaccgccattatgaacagcgattgtttggttttcgacactagcatcgctcaactgttcgccgaaaatggaaacctggggattaatgtgacgatctccatgtgc

SEQ ID NO: 33623 - DNA, 846 bp, synthetic construct
  misc_feature 1..846: note = Description of Artificial Sequence: Synthetic coding sequence
  source 1..846: mol_type = other DNA
atgagtcgccagaccgcaaccgccctcccgaccggaacatctaagtgccctccctcccaacgcgtgcctgcgctcactggcaccacagctagcaataatgacctggcctcactgttcgaatgccccgtgtgcttcgattatgtgctgccacccatcctccagtgccagagtgggcatctggtttgctcgaactgtaggccgaaactgacttgctgtcccacctgccgcggcccactcggcagcattaggaacctggctatggaaaaagtcgctaattctgttctgtttccctgcaaatatgcaagcagtggttgtgaaatcacattaccacacaccgagaaagcggaccacgaagagttgtgcgaatttcgaccttacagttgtccgtgtcctggcgcaagttgtaagtggcagggatctctcgacgccgtgatgccacacctgatgcaccagcataaatctattacgacccttcagggtgaggacatcgtgttcctagcgacggatatcaacctgcccggagccgtagattgggtgatgatgcagtcctgctttgggttccacttcatgttggtcctggagaaacaggaaaagtacgacggtcaccagcagtttttcgccatcgtacagcttattggcaccagaaagcaggccgagaacttcgcatacaggttggaactcaatgggcacaggcggagactgacctgggaagcgaccccccggtccatccatgaggggattgccacagccattatgaactctgactgcttggtgttcgacacatcaattgcccagctgttcgccgaaaacggcaatctcggcatcaatgttaccatctcaatgtgc

SEQ ID NO: 33624 - DNA, 846 bp, synthetic construct
  misc_feature 1..846: note = Description of Artificial Sequence: Synthetic coding sequence
  source 1..846: mol_type = other DNA
atgtctcggcagacggccaccgcactgcccactggtacatccaagtgtcctccctcccagcgggtacctgctctgaccggaaccaccgcaagtaataacgatcttgcttcgctgtttgagtgccccgtttgcttcgattatgtgctgcccccgatactgcaatgtcagtccggacatctggtatgcagcaattgccgccccaagctaacatgttgcccaacctgcagaggccccctcggatccattaggaatttagccatggaaaaagtcgccaattctgtactgtttccctgcaagtacgcatcaagtgggtgcgagattacactgcctcatacagagaaggccgaccacgaggagttgtgtgaattccgtccttactcctgcccatgtccgggtgcgagttgcaagtggcagggatctctcgacgcggtgatgcctcatttaatgcaccagcataagagtataactactttacagggggaagacattgtcttcttggcaacagacatcaacttgccgggggccgtcgattgggttatgatgcagagctgctttggcttccacttcatgctagtgctggagaagcaggaaaaatacgacgggcaccaacagttcttcgcaattgtgcagctgatcggcacccgaaaacaggccgagaactttgcttaccgtctagagttgaacggacaccgacgcaggctgacttgggaggccacccctcgctccattcatgaaggaatcgcaacggctatcatgaactcggattgcctggttttcgatacgtcaatagcacaactgttcgccgaaaatgggaacctgggtataaacgttactatatcaatgtgc

SEQ ID NO: 33625 - DNA, 846 bp, synthetic construct
  misc_feature 1..846: note = Description of Artificial Sequence: Synthetic coding sequence
  source 1..846: mol_type = other DNA
atgtcacggcagactgccaccgcactgcccactggcacgtccaagtgcccgccttcgcagcgcgtgcctgcactgactggtaccactgcctcgaataatgacctggcaagcctgtttgaatgcccagtgtgtttcgactacgtgctcccgcccatcctgcagtgccagtcggggcatctggtctgctcgaattgccggcctaaactgacctgttgcccgacctgcagaggccccctcggatccatccgaaacctcgcaatggaaaaggtcgcgaattcggttctcttcccatgcaaatacgcatcttccgggtgcgagatcactctgccccacaccgagaaagcagaccacgaggaactgtgcgagtttcggccgtactcgtgcccgtgccctggggcctcttgtaagtggcagggttcgctcgacgccgtcatgccgcacctcatgcatcaacacaagagcatcactacgctgcagggcgaagatattgtctttctcgccactgatatcaacctgccgggtgctgtcgactgggtcatgatgcaatcctgtttcggattccacttcatgttggtgctcgagaagcaggaaaagtacgatgggcatcagcagttcttcgccatcgtgcagctgatcggcactagaaaacaagccgaaaacttcgcctacaggctcgagctcaatggtcaccggcgccggctgacttgggaagcgaccccaaggtcgatccacgagggaatcgccactgctatcatgaattcggactgccttgtgttcgacacttcaatcgcgcaactgttcgcggaaaacggaaacctgggaatcaatgtgaccatctcgatgtgc

SEQ ID NO: 33626 - DNA, 846 bp, synthetic construct
  misc_feature 1..846: note = Description of Artificial Sequence: Synthetic coding sequence
  source 1..846: mol_type = other DNA
atgagccgccagaccgcgaccgctctgcctactggtacttcgaagtgccctccgtctcaacgtgtccccgccctgaccggaaccactgccagcaacaatgatctcgcctcccttttcgaatgcccagtctgttttgactacgtcctcccgccgatcctgcagtgtcagagcggacatctcgtgtgttcaaattgccggccaaaactcacttgctgccctacttgccgcggaccgttgggtagcatcagaaatctggcaatggaaaaagtcgccaactcggttctcttcccatgcaaatacgcttcatcaggatgcgaaatcacccttccgcacactgagaaggctgaccacgaagaactctgcgagttccggccatactcttgcccttgcccaggtgcctcctgcaagtggcaaggatcactggatgcggtgatgccgcatctcatgcaccagcataaatcgattactactcttcagggagaggacatcgtgtttctcgccaccgacatcaacctgccgggtgccgtggattgggtgatgatgcaatcatgtttcggatttcacttcatgttggtgctcgagaagcaagaaaagtacgacgggcatcagcagttctttgctatcgtgcagctgattggaactaggaagcaagcggagaacttcgcataccggctcgagctgaacggtcatcgcaggaggctcacttgggaagcaactccgcggtcaatccacgagggaatcgccactgccatcatgaactcggattgcctggtgtttgacaccagcatcgctcaattgttcgccgaaaacggcaaccttgggatcaacgtgactatctcgatgtgc

SEQ ID NO: 33627 - DNA, 846 bp, synthetic construct
  misc_feature 1..846: note = Description of Artificial Sequence: Synthetic coding sequence
  source 1..846: mol_type = other DNA
atgagccggcagaccgcaaccgccctgccgacgggaacttcaaagtgcccgccgagccagcgcgtgcccgcgctgactggaactactgcatcgaataatgacttggcttccctgttcgaatgcccggtgtgcttcgattacgtgctgcctcccatcttgcaatgtcagagcggtcacctcgtatgttccaactgcagacctaaactgacttgctgcccgacttgccggggtccactgggatccatccgaaacctcgctatggagaaagttgctaactcagtgctgttcccttgtaagtacgccagtagcgggtgcgaaatcaccctcccccacactgagaaagcggatcatgaagagctgtgtgagttccggccgtattcatgtccttgcccgggtgcctcatgcaagtggcaaggttcgctggacgccgtgatgccacacctgatgcaccagcataaatcgatcaccaccctccaaggagaagacattgttttcctcgcaactgacatcaacctgccaggagccgtggattgggtcatgatgcagtcttgcttcggcttccatttcatgctggtccttgaaaagcaggagaagtacgacggacaccaacagttctttgccatcgtgcagctgatcggcaccagaaagcaggcagagaatttcgcctaccgcctcgaacttaatgggcaccggcgaagactgacctgggaagcaacccctcgatccattcatgagggaatagctacggcaattatgaactcggattgcctcgtgtttgacactagcatcgctcaattgtttgccgaaaacggaaatcttgggattaacgtcacgatcagcatgtgc

SEQ ID NO: 33628 - DNA, 846 bp, synthetic construct
  misc_feature 1..846: note = Description of Artificial Sequence: Synthetic coding sequence
  source 1..846: mol_type = other DNA
atgtcgcgccaaacagctaccgccctgcctacggggacctctaagtgccccccaagccagcgagtccctgcgctgacgggcactaccgccagcaacaatgatctcgcaagcctcttcgagtgccctgtgtgtttcgactatgtactgccccctatcctgcagtgccagtccggtcatttggtgtgtagcaactgtcggcctaagctgacctgctgccccacgtgtaggggacctcttggctcgatccgaaacctggctatggaaaaagtcgccaactccgtgctgttcccctgtaagtacgcctcttcaggatgtgagatcactctccctcacaccgaaaaagccgaccatgaagagttatgtgaatttagaccctactcctgtccttgtcctggggccagttgcaagtggcaggggagtctggacgccgttatgccccacctgatgcatcagcataagagtatcactaccctgcaaggcgaagacattgtgttcctagcaactgatattaacttgcctggggctgtcgactgggtcatgatgcagtcttgtttcgggtttcacttcatgctggtactggagaaacaagagaaatacgatggccaccagcagttctttgctatcgtgcagctgatcggaactagaaagcaggccgagaacttcgcttatcgcttagaactcaatggtcacagaagacggctgacctgggaggcgaccccccgcagcatccacgaaggaatcgccactgccataatgaattctgactgcttagttttcgacacatctatcgcccagcttttcgctgaaaatggcaatttggggattaatgtcaccatcagtatgtgc

SEQ ID NO: 33629 - DNA, 846 bp, synthetic construct
  misc_feature 1..846: note = Description of Artificial Sequence: Synthetic coding sequence
  source 1..846: mol_type = other DNA
atgtcgcggcagactgctacggctctgcctaccggaacgtcgaaatgcccaccgtcccaaagggtgcctgccctgaccggcactacggcgtccaataatgaccttgcaagcctgttcgaatgtccggtttgcttcgactacgtcctcccacctatcttgcagtgccagtcaggtcacctcgtttgttccaattgtcgcccaaaactgacttgctgcccaacttgtcggggaccgctgggaagcatcagaaatttggctatggagaaggtcgctaactccgtgctcttcccctgtaagtatgcctcatcaggatgtgaaattactctgccgcataccgagaaagcggaccacgaagagctctgcgagtttcgcccatactcctgcccgtgccctggagcctcctgtaagtggcagggatcactggatgccgtgatgccgcacctgatgcatcaacataaatcgattaccaccctccagggagaggacatcgtgttcctggcgactgacatcaatctgccgggagcggtggactgggttatgatgcaatcatgcttcggattccatttcatgctggtgcttgaaaagcaagaaaagtacgatggacaccagcagttcttcgctattgtccagctgatcggaactcgcaagcaggcggagaacttcgcttacagactggaactgaacggacacagacgccggctcacctgggaagccactccgcggtctatccacgagggaatcgcaaccgcaatcatgaattccgactgcctggtctttgatactagcatcgcgcagctgttcgctgaaaacggaaacttgggaataaacgtgaccatctctatgtgc

SEQ ID NO: 33630 - DNA, 846 bp, synthetic construct
  misc_feature 1..846: note = Description of Artificial Sequence: Synthetic coding sequence
  source 1..846: mol_type = other DNA
atgtcaagacaaaccgcgactgctctgccaactgggacctcgaagtgcccaccttcgcagcgcgtccctgcactgactggtactaccgcatcaaacaatgatctcgcatctctgttcgagtgtcctgtgtgttttgattacgtgcttcctcctatcctgcagtgtcagtcaggtcaccttgtctgtagcaattgtcgaccaaaattgacctgttgtccaacctgtagaggcccactcggttcaattaggaatctcgcaatggaaaaggtggcaaacagcgtcctctttccttgtaaatacgcatcgtcgggatgtgaaatcacgctccctcatactgagaaagcagatcacgaagagctgtgcgaatttcggccctactcgtgcccttgtccgggtgcttcctgtaagtggcagggttcactggacgcagtaatgccccatctgatgcaccaacataaaagcattaccactcttcaaggagaggacattgtgtttcttgcaacggacattaaccttccaggagcggtggactgggtgatgatgcaatcgtgtttcggatttcatttcatgttggtgcttgaaaagcaggagaagtacgatggccaccaacagtttttcgcgattgttcagctgattggaacgcggaagcaggcagagaatttcgcctaccgacttgaacttaatggtcataggcgccggctgacctgggaagcaaccccacgaagcatccatgagggaatcgcgaccgcaattatgaactccgattgtctcgtctttgatacgtccattgcccaattgtttgcggaaaacggcaacctgggcattaatgtaaccatctccatgtgt

SEQ ID NO: 33631 - DNA, 846 bp, synthetic construct
  misc_feature 1..846: note = Description of Artificial Sequence: Synthetic coding sequence
  source 1..846: mol_type = other DNA
atgagccgccagacggcgactgctctcccaacgggaactagcaaatgtcctccctctcaacgcgtgccagcacttaccggtaccactgcgtcaaacaatgacttggcgagcctcttcgaatgtcctgtctgcttcgactatgtgctcccccctatccttcagtgtcaatcgggtcatctcgtttgttcgaactgccggcctaagctgacttgctgtcctacctgcagaggacctttgggctcaattagaaatttggcaatggaaaaagtcgcaaactccgtgttgtttccatgcaagtacgcatcatccggttgtgaaattaccctgccacacacggaaaaggccgatcacgaagaactgtgcgaattccgcccttactcctgtccatgccctggagcaagctgcaagtggcaaggatcgttggatgcagttatgccacaccttatgcaccagcacaagtcgataactactctccagggggaagatatagtgttcctggcaacggatatcaacctcccaggggcagtcgactgggtcatgatgcagtcgtgttttgggtttcacttcatgctggtgctcgaaaagcaggaaaagtacgatggccatcagcagttctttgctattgtgcaacttattggaaccagaaagcaagccgagaactttgcataccgactggagctgaatggacatcgcaggcgtttgacttgggaagcgaccccccggtcgatccatgaggggatcgccactgcaattatgaattccgattgtctcgtctttgacacttcgattgcacaattgtttgccgaaaacggcaaccttggaatcaacgtgactatttcgatgtgt

SEQ ID NO: 33632 - DNA, 846 bp, synthetic construct
  misc_feature 1..846: note = Description of Artificial Sequence: Synthetic coding sequence
  source 1..846: mol_type = other DNA
atgtctcggcagacggcgactgcactccctacaggcacatccaagtgccccccttcacagagagtgcctgcccttactggaaccacggccagcaataacgaccttgcttcccttttcgaatgcccagtctgctttgactacgtgttgcctcctatcctgcagtgccaatcagggcatctggtgtgttctaattgtaggcctaaacttacatgctgcccaacgtgccgcggtccactgggttcaatccggaacctcgccatggaaaaggtggctaatagtgtgctgtttccatgcaagtatgcctctagcggatgtgagatcacactcccccacactgaaaaagccgatcacgaagaactctgtgaatttaggccttatagttgtccctgtcccggcgcatcctgtaagtggcagggcagtcttgacgctgtgatgccacacctgatgcaccagcacaagtccataacaaccctgcagggagaggacatcgtcttcctcgcgaccgacataaacttgcccggtgcagttgactgggtgatgatgcagtcatgtttcggtttccacttcatgctcgttcttgagaaacaggagaaatacgatggacatcagcagtttttcgccattgttcagctcatcggtactcggaagcaggccgagaactttgcgtaccgcttggagctcaacgggcaccgcagacggctcacttgggaagcgacccctagatccattcacgaaggcatcgcgacagctattatgaactctgactgcttggtgtttgacacatcaattgcccaactctttgcggaaaacggaaatctggggatcaacgttacgattagtatgtgt

SEQ ID NO: 33633 - DNA, 846 bp, synthetic construct
  misc_feature 1..846: note = Description of Artificial Sequence: Synthetic coding sequence
  source 1..846: mol_type = other DNA
atgtcgcgacaaacggcgacggcgttaccgacgggtacgtcgaaatgtccgccgtcgcaacgagtaccggcgttaacgggtacgacggcgtcgaataatgatttagcgtcgctatttgaatgtccggtatgttttgattatgttttaccgccgatattacaatgtcaatcgggtcatctagtttgttcgaattgtcgtccgaaactaacgtgttgtccgacgtgtcgaggtccgttaggttcgatacgaaatctagcgatggaaaaagttgcgaattcggttctatttccgtgtaaatatgcgtcgtcgggttgtgaaataacgttaccgcatacggaaaaagcggatcatgaagaactatgtgaatttcgaccgtattcgtgtccgtgtccgggtgcgtcgtgtaaatggcaaggttcgctagatgcggtaatgccgcatctaatgcatcaacataaatcgataacgacgttacaaggtgaagatatagtttttttagcgacggatataaatctaccgggtgcggtagattgggtaatgatgcaatcgtgttttggttttcattttatgttagtattagaaaaacaagaaaaatatgatggtcatcaacaattttttgcgatagtacaattaataggtacgcgtaaacaagcggaaaattttgcgtatcgtctagaattaaatggtcatcgtcgtcgtttaacgtgggaagcgacgccgcgatcgatacatgaaggtatagcgacggcgataatgaattcggattgtttagtatttgatacgtcgatagcgcaactatttgcggaaaatggtaatttaggtataaatgtaacgatatcgatgtgt

SEQ ID NO: 33634 - DNA, 846 bp, synthetic construct
  misc_feature 1..846: note = Description of Artificial Sequence: Synthetic coding sequence
  source 1..846: mol_type = other DNA
atgtcacgtcagacagcaactgccctccctacaggcaccagtaagtgcccaccctcccagagggtccctgccctgactggaacaaccgcaagcaataacgacttggctagtcttttcgaatgccccgtgtgtttcgactacgtgctccccccaatcctgcaatgtcagtctggtcacctggtctgtagcaactgtaggcctaagctcacctgctgtccaacatgtcgcggtcccttgggttcaatcaggaacctcgctatggagaaggtagccaacagcgtactgtttccatgtaagtacgctagctccggatgtgagatcacactgccccacacagaaaaggccgaccacgaggaactgtgtgaattcagaccttacagctgcccatgcccaggtgctagctgtaagtggcaaggcagtctggacgccgttatgccccatcttatgcatcagcacaaaagcatcacaactctccagggcgaagacatcgtgtttctggctaccgatatcaatttgcctggagctgtagactgggtaatgatgcagtcttgtttcggctttcacttcatgctggtactcgagaagcaggagaagtacgacggtcatcagcagtttttcgcaatcgttcagctgataggaaccaggaagcaggctgaaaatttcgcctatcgcctcgagctgaatggacatcgccgtaggttgacttgggaagcaactcccagatctatccacgagggaatcgccactgctatcatgaatagcgactgccttgtgttcgacaccagtatcgctcaattgtttgctgagaacggtaacttgggtatcaacgtgacaatttcaatgtgc

SEQ ID NO: 33635 - DNA, 846 bp, synthetic construct
  misc_feature 1..846: note = Description of Artificial Sequence: Synthetic coding sequence
  source 1..846: mol_type = other DNA
atgtctcgacagacagcaaccgctctgccgaccggaacctccaagtgtccaccctcgcagcgggtccccgcccttacgggtacaaccgcttccaacaatgatctggcatcattgttcgaatgccctgtgtgttttgattacgtattgccccctattctccagtgtcagtccgggcatttggtttgcagcaactgccgccctaagcttacctgctgccctacctgccgaggccctctaggtagtatcagaaatcttgctatggaaaaagttgccaactcggtcctctttccatgcaagtatgccagctcgggttgtgaaattacattgcctcacacagaaaaagccgatcacgaggaattatgcgaattccgaccctactcctgcccctgtccaggcgctagttgtaaatggcaaggcagcctagatgccgttatgccccacttgatgcatcagcataagagtatcaccaccctacaaggtgaggacattgtttttcttgctaccgacattaatttacccggggccgtggattgggtcatgatgcagtcgtgttttgggttccatttcatgctcgttttggagaaacaagaaaaatacgacggccatcaacaattttttgccatcgttcagctgatcggaactcgcaagcaggcagagaacttcgcgtataggcttgagttaaacggccatcgtcgtcgtctgacctgggaagctacccctcgctcgatccatgaaggaatcgcaaccgctattatgaactcggactgtctggtttttgacacatcaattgcccaactgttcgctgagaatggcaatctgggaatcaacgttacaatctcgatgtgt

SEQ ID NO: 33636 - DNA, 846 bp, synthetic construct
  misc_feature 1..846: note = Description of Artificial Sequence: Synthetic coding sequence
  source 1..846: mol_type = other DNA
atgtcgcggcaaacggctactgctcttcctactggaacgtccaagtgccctccatcgcaaagggtgcctgcactgaccggtactaccgcgtccaacaacgacctggccagcctgttcgaatgccctgtgtgtttcgattacgtgctcccaccgatccttcagtgtcagtcaggccatttggtgtgctccaattgtcgtcccaagttgacctgttgcccgacttgcagaggaccactgggatctatccgcaacctcgcgatggagaaggtggctaattcagtgctcttcccttgcaagtacgcatccagcgggtgtgaaatcactctgccacataccgagaaggcggaccatgaagagctgtgcgaattccgcccatattcgtgcccatgccccggtgcttcatgcaagtggcaaggctcgctggacgcagttatgcctcacctcatgcaccagcacaaatcgatcaccacgctccagggagaggacatcgtgtttctggcgaccgatatcaaccttcccggcgccgtcgactgggtgatgatgcagtcgtgctttggcttccacttcatgctcgtgctggaaaaacaagagaaatacgacggacaccaacagttcttcgctatagtccagctgattggaacccggaagcaggccgaaaactttgcctaccgcctggaactgaatggacaccgccgacgcctcacttgggaagccactccgcggtcaattcatgagggaattgccactgccatcatgaactcggattgcctggtctttgatacctctatagcccaactgttcgccgagaatgggaacctcggaatcaacgtcaccatctccatgtgc

SEQ ID NO: 33637 - DNA, 846 bp, synthetic construct
  misc_feature 1..846: note = Description of Artificial Sequence: Synthetic coding sequence
  source 1..846: mol_type = other DNA
atgtcgcgccagaccgcaactgcgctccctactggtacgagcaagtgtcccccctcacaaagggtgcccgccctgactggtaccactgcatccaacaatgacctcgctagcctgtttgaatgcccagtgtgtttcgattacgtcctcccaccaatccttcagtgtcaatccgggcatctggtttgcagcaattgcagaccgaagctgacctgctgccccacctgtagaggtcctctgggtagcataagaaaccttgcaatggaaaaagtcgcaaatagcgtcttgtttccctgtaaatacgcatcatccggttgtgaaattactctgcctcacaccgaaaaggcggatcatgaggagctgtgcgaatttagaccatattcctgcccgtgcccaggggcatcatgtaagtggcaaggatccctggatgccgtgatgccccatcttatgcatcaacataagagcataacgactctgcagggcgaggacatcgtgttcctggctactgatatcaaccttcctggtgcagtcgactgggtgatgatgcaaagctgtttcggatttcactttatgctcgtcctggaaaaacaagagaaatacgacggccatcagcagtttttcgcaattgtacagctcatcggaacccgtaagcaagcagaaaacttcgcataccgcctggaacttaatggccatagaaggcgtctgacttgggaggctacccctcggtcgatacacgaagggattgcaaccgcaattatgaacagcgattgtctggtctttgatacctcgatagcgcaactcttcgcagagaacggaaacctgggtattaacgtcactatctcaatgtgt

SEQ ID NO: 33638 - DNA, 846 bp, synthetic construct
  misc_feature 1..846: note = Description of Artificial Sequence: Synthetic coding sequence
  source 1..846: mol_type = other DNA
atgtcacggcagacagccacggctctgcccacgggcacctcaaaatgcccccccagccaacgcgtgcccgcgttgacagggaccacagctagcaacaacgacttagcgtccttatttgagtgccccgtttgctttgattacgtgctgccgcctatcctgcagtgtcaaagtggtcacctggtctgcagcaactgccgtccaaagttgacatgctgccctacatgtaggggaccactcggcagcatcagaaacctcgctatggaaaaagttgcgaactcggttctctttccctgtaagtacgcaagcagcggttgcgaaatcacactgccgcacacggaaaaggccgaccatgaagagttgtgtgaattccgaccttattcatgcccatgccctggggcatcatgtaagtggcaggggtccttggatgcggttatgcctcacctaatgcatcaacacaagtcaatcacaaccctccagggagaggacattgtattcctcgccacagacattaatctgcctggcgcagtggactgggtgatgatgcagtcctgctttggctttcacttcatgctggtgctagaaaaacaggaaaagtacgatggtcaccaacagtttttcgcgatcgtgcaacttataggcactcggaaacaggccgagaacttcgcctaccgccttgagctaaacgggcaccgtcgcagactgacctgggaggctacgccgaggtccattcacgaaggcattgccactgcaatcatgaattctgattgtcttgtctttgacacctccatcgcccagctcttcgcagagaacggcaaccttggcatcaatgtgactatatcaatgtgt

SEQ ID NO: 33639 - DNA, 846 bp, synthetic construct
  misc_feature 1..846: note = Description of Artificial Sequence: Synthetic coding sequence
  source 1..846: mol_type = other DNA
atgtctcgtcagaccgctaccgccctccccacgggcacttcgaagtgtcccccctcccagagggtgccggccctgaccggcactactgcctctaacaatgatcttgcctctctgttcgagtgcccagtgtgcttcgactacgtgctgccccccatcctgcaatgccagtccggacaccttgtttgtagcaactgcagacctaaactcacttgctgtcccacctgccggggtcctctgggatctattaggaacttagcgatggagaaggtggctaattctgtattattcccttgcaagtacgctagctcaggatgtgagataactttgccacacaccgaaaaagccgaccatgaggagctgtgcgaattccgcccttacagctgcccctgtcccggggcaagctgtaaatggcagggaagcctggacgccgtgatgccacacttgatgcaccaacataagtctattactacgctgcagggagaagacatcgtgttcctggctactgatatcaaccttccaggcgcagtggattgggtgatgatgcagtcatgctttgggtttcattttatgcttgtcctggagaagcaggaaaagtatgacggccatcagcagtttttcgccatagtacagctcatcgggacccggaaacaggctgagaatttcgcttacagactggagctaaacggccatcgacgacgactgacctgggaagcaacccccagatcaatccatgaagggatcgcaacagcaattatgaattctgactgcctggtgttcgatacaagcatcgcgcagttatttgcagagaacggaaatctgggcatcaacgtgacgatcagtatgtgt

SEQ ID NO: 33640 - DNA, 846 bp, synthetic construct
  misc_feature 1..846: note = Description of Artificial Sequence: Synthetic coding sequence
  source 1..846: mol_type = other DNA
atgagtaggcagactgcgacagccctgcccaccgggacttcaaaatgccctcctagtcaacgggtgcctgccttaacaggcactaccgctagcaataatgaccttgcatctctttttgaatgtcctgtttgcttcgattatgtgcttccccctattctgcaatgccagagtgggcatctggtgtgctctaactgtaggcccaaactcacctgttgtcctacgtgtagaggtccccttggttccatcagaaacctggccatggaaaaggtggcgaactcagtgctgttcccatgcaaatatgcgtccagcggctgcgaaattaccctcccgcacacagaaaaagcggatcacgaggagctctgtgagtttcgtccatactcttgcccttgtccaggtgcgtcgtgcaaatggcaaggttctctggatgccgtgatgcctcacttgatgcatcagcacaaaagcatcaccacactacagggtgaagacattgtcttcctcgcgaccgacataaacctgccgggggcagtggactgggtaatgatgcagtcatgcttcgggtttcactttatgctggtgctggagaagcaggaaaagtacgatggccatcaacagttcttcgccattgtccagctcattggcacccggaagcaagcggagaactttgcctatagactggagctgaatggtcatcggagacgcctgacatgggaagccacccctagatcaatccacgaaggtatagctaccgccatcatgaattcggattgtctggtgtttgatacgtctatcgcacagctcttcgccgagaacggaaatctggggatcaatgtgacaatctctatgtgt

SEQ ID NO: 33641 - DNA, 846 bp, synthetic construct
  misc_feature 1..846: note = Description of Artificial Sequence: Synthetic coding sequence
  source 1..846: mol_type = other DNA
atgtcccgacagactgcaaccgcactgcctaccggaactagcaaatgtccaccatctcagagagtgcccgccctgacgggaacgaccgcaagcaacaatgaccttgcttcactttttgagtgcccagtttgtttcgattacgtgctgccacccattcttcagtgtcaatccggtcacctggtctgctctaattgcaggccgaaacttacttgttgtcccacctgtagaggaccgctcggttcgatcagaaacctggcaatggaaaaggtggcaaactcggtgctgttcccgtgcaagtacgcctccagcggatgtgagattactcttcctcatactgagaaggcagaccacgaagaactttgtgagtttcgtccctactcctgtccctgcccgggagcctcgtgcaaatggcaaggttcgttggatgcagtaatgccccatctcatgcatcagcacaagtccattactaccctgcagggcgaggatatcgtgtttttggcaactgacataaatctgcccggtgctgtcgattgggtgatgatgcaatcatgctttggattccactttatgctcgtgcttgaaaaacaagaaaagtatgatggtcatcaacagtttttcgcgatcgtgcaacttataggaaccagaaagcaagcagagaactttgcatacaggcttgaattgaatggacatcggcgtaggcttacctgggaagccactcctagaagcatacacgaaggtattgcaaccgcaattatgaactccgattgtctggtttttgacacctcgatcgctcagctttttgcagaaaacgggaacctcggaattaacgtcaccatctcgatgtgt

SEQ ID NO: 33642 - DNA, 846 bp, synthetic construct
  misc_feature 1..846: note = Description of Artificial Sequence: Synthetic coding sequence
  source 1..846: mol_type = other DNA
atgtctcgccagaccgctactgcgctgccgaccggaactagcaagtgcccccctagccagcgcgttccagcacttacaggtactacagcttccaataatgacctggcgagcctgtttgaatgtcctgtttgcttcgattacgtgctcccacccatccttcagtgccagtctgggcatcttgtgtgctcaaactgtaggcctaaactgacttgttgtccaacatgtaggggaccactgggtagcattaggaacctggctatggagaaggttgcaaacagcgtgctgttcccgtgcaagtacgcttctagcggatgcgaaatcacgctgccacacacagagaaagctgaccacgaagaactgtgcgagttccgaccatacagctgcccctgcccaggcgcctcttgtaaatggcaggggtcactggatgccgtcatgccacaccttatgcaccagcacaaatccatcacaacgcttcagggggaggatatcgtgttcctcgcaactgatatcaatctgccgggcgcagttgattgggtgatgatgcaatcctgcttcggtttccatttcatgcttgtgctggaaaagcaggaaaaatacgatggccatcagcagtttttcgctatcgtccaactcatcggaaccaggaagcaggcagagaactttgcctatcgcctggaacttaacggccatagaaggagattaacatgggaggcaaccccgcgatcaattcatgaaggcatagcgaccgcaataatgaattcagactgcttagtctttgatacatctattgctcagctatttgctgaaaatggcaacctgggcataaacgttacaatctctatgtgc

SEQ ID NO: 33643 - DNA, 846 bp, synthetic construct
  misc_feature 1..846: note = Description of Artificial Sequence: Synthetic coding sequence
  source 1..846: mol_type = other DNA
atgtcccgacaaactgcaaccgccctgccaaccgggacttcaaaatgtccaccgagccaacgagtgccagccctcacgggtaccaccgcctcgaacaatgatctggcgtcgctttttgaatgccctgtctgttttgactacgtcctgccacctattctgcaatgtcagtcgggacatctggtatgtagcaactgtagacccaagctcacttgttgccccacctgtcggggaccacttggatcgattagaaacctggcaatggaaaaagtggcgaattccgtgctgttcccctgtaaatacgcatcaagcggctgtgagattaccctgccccataccgaaaaggcagatcacgaggaattgtgcgagttcagaccttacagctgcccgtgtcctggagctagctgtaaatggcaggggtcgctggatgcagttatgccccatttgatgcatcagcataagagcataactaccctccagggtgaagatatcgtgtttttggcgaccgacattaacctgccaggggcagtggattgggtcatgatgcagtcatgcttcggatttcactttatgcttgtcctggagaagcaagaaaagtacgatggtcatcaacagttttttgcaattgtgcagctgattggtactaggaagcaagcagagaacttcgcttaccgcctcgagcttaatggccatcgtagacggctgacttgggaggccactccaagatcaattcatgaaggtattgccaccgccattatgaattcggactgtctggtgtttgatacctctattgcacaactgttcgcagaaaacggaaatcttggaataaacgtgactatttcaatgtgt

SEQ ID NO: 33644 - DNA, 846 bp, synthetic construct
  misc_feature 1..846: note = Description of Artificial Sequence: Synthetic coding sequence
  source 1..846: mol_type = other DNA
atgagccgtcagacagctactgccctgccaactggtacatcgaagtgtcccccttctcaacgggtccccgctttaacagggaccactgcctccaataacgatttagcctctctgtttgagtgtccggtgtgcttcgattacgtgctaccacctatcctgcagtgtcaaagtggacacctagtgtgctctaattgccgccctaaacttacctgttgtcccacatgtaggggacctttagggtcgattcgcaatcttgccatggagaaagtcgctaatagtgtgttgtttccgtgcaagtatgcttcctcaggttgtgagattacgctccctcataccgagaaggctgatcacgaggagctctgtgagtttcggccctatagttgtccgtgccccggagcttcctgcaagtggcagggctctctcgacgcagtgatgccacacctgatgcaccagcataagtccatcacaacactgcagggagaggacatagtctttctggcgacagacattaacctaccaggtgcagtggattgggtgatgatgcagagctgcttcggcttccacttcatgctggtgctggagaaacaggagaaatatgatggacaccagcagtttttcgccatcgtacagttgattggtacaaggaaacaggctgaaaactttgcctatcgccttgaactgaacgggcataggcggcgactgacatgggaggcaacccctagaagcatacacgaaggcattgctacagctatcatgaactccgactgcctcgtgtttgacacatccatcgctcagctctttgcagaaaatggcaacctggggatcaacgtgaccatctcgatgtgt

SEQ ID NO: 33645 - DNA, 846 bp, synthetic construct
  misc_feature 1..846: note = Description of Artificial Sequence: Synthetic coding sequence
  source 1..846: mol_type = other DNA
atgtcacgccagactgctactgcgctgccaaccgggacctcgaaatgcccgccgtcgcagcgggtcccagcacttacgggcactactgcttccaataatgaccttgcttccctgttcgagtgcccagtttgtttcgactatgtcctgccgcccatcctgcaatgccagtccgggcatctggtgtgctcgaactgccgccctaagttgacgtgctgcccgacttgccggggaccattgggatcaatccgcaatctcgcgatggaaaaggtggccaactccgtgctgtttccatgtaagtacgcgtcctcaggttgcgaaataaccctcccgcacaccgagaaagctgaccatgaagagttgtgcgaatttagaccttacagctgtccttgccctggagcctcttgcaagtggcaaggtagcctcgatgctgtgatgccgcatttgatgcatcagcacaagtccatcactacccttcaaggcgaggacatcgtgttcctggcaaccgatatcaatctcccaggcgccgtggattgggtcatgatgcagtcatgtttcggattccatttcatgctggtgcttgagaaacaggagaaatacgacggacaccaacagttcttcgccatcgtccaactgattggtactcggaagcaggccgaaaacttcgcctaccggctcgaactgaacggccaccggagacggctcacttgggaggcaaccccacgctccatccacgaagggatcgctactgcaatcatgaatagcgattgccttgtgttcgatacctccatcgctcagctgttcgccgaaaatggaaatcttggaatcaacgtcaccatctccatgtgt

SEQ ID NO: 33646 - DNA, 846 bp, synthetic construct
  misc_feature 1..846: note = Description of Artificial Sequence: Synthetic coding sequence
  source 1..846: mol_type = other DNA
atgtccagacagactgctaccgccctacccaccggcacctcaaaatgtccacccagccagcgtgtgccagctttaacaggcaccactgcctctaacaatgacctcgcttctctgttcgagtgtcctgtatgcttcgattatgtgttaccgcccatcctccagtgccagtccgggcatctggtttgttccaattgcaggcccaaactcacctgttgccccacctgtaggggcccattgggatctattcggaatttagctatggagaaagtggccaatagcgtcttgtttccttgtaagtacgcaagcagtggatgcgaaataactctaccacacacagagaaggccgatcacgaggagttgtgcgaattccgtccttattcctgtccatgtcccggagcatcctgcaagtggcagggctccctggatgctgtgatgccacatctcatgcatcaacacaagtccatcaccaccctacagggggaggacatagtttttctagcaaccgatataaacttacctggcgccgtggactgggtgatgatgcagtcctgttttgggtttcatttcatgttggttctggagaaacaagagaagtacgatggccaccagcaattcttcgctatcgtccagctgataggcactagaaagcaggcagagaattttgcctatcgcttggaactgaacggccaccgtagacgactgacttgggaggcaacccctcggagcatccacgaggggattgccaccgccatcatgaacagcgattgcctggtgtttgacacctccattgctcaattattcgcagagaacggaaatctgggcattaatgtgacaatctccatgtgt

SEQ ID NO: 33647 - DNA, 846 bp, synthetic construct
  misc_feature 1..846: note = Description of Artificial Sequence: Synthetic coding sequence
  source 1..846: mol_type = other DNA
atgtcaaggcagacagccaccgcgctgccgactggcacctctaagtgcccgccctcccaacgcgtaccggccctgaccgggacaaccgcctctaacaacgaccttgcctctcttttcgagtgccctgtttgttttgattacgtgctgccccctattctgcagtgccaatctggtcacctggtgtgtagtaattgtaggcctaaacttacctgttgtcctacctgtcgtggtcctcttggcagtattagaaacctcgctatggagaaagtggccaactccgttctattcccctgcaagtatgcttcttctggctgcgaaattaccctgccccataccgaaaaagccgatcacgaggaattatgtgagtttcggccttactcatgcccatgccccggtgcttcctgcaaatggcaaggatcactggacgcggtgatgccccacttaatgcaccaacataagagtattacaacactgcagggagaggacatagtctttctggccaccgacatcaatcttcccggggctgtcgactgggttatgatgcagtcatgtttcggctttcactttatgctggtgctcgagaaacaggagaaatacgatgggcaccagcaattcttcgctatagtccagctgattggaacgcgaaagcaggccgagaactttgcgtatagattggagctgaacggacaccggagaagactgacatgggaggccactcctagatcaatacatgaggggatagccacagcaatcatgaatagtgattgcttggtgtttgatacctctattgcccagctgtttgctgagaacggaaatctgggaataaacgtgacaatcagcatgtgc

SEQ ID NO: 33648 - DNA, 846 bp, synthetic construct
  misc_feature 1..846: note = Description of Artificial Sequence: Synthetic coding sequence
  source 1..846: mol_type = other DNA
atgagcaggcaaaccgccacagcgctacctaccggcacatctaagtgccccccatcccagagagtgcccgcgctgacaggaactacagcttcaaataacgatcttgcctctttgttcgagtgtcccgtgtgcttcgattacgtgctgccacccatactgcaatgtcagtcggggcatctggtttgcagcaattgtaggccaaagctgacatgctgcccaacctgtaggggtccattgggttctattcggaatttggctatggagaaagttgccaactcagtcctgttcccttgtaagtatgcttcttccggatgcgaaataactctgccacacacagagaaagcagaccatgaggaactctgtgagttccgcccctattcttgtccctgccccggagcctcttgcaagtggcaggggtctttggatgcagttatgccccatttaatgcatcagcacaaatccattacgaccctccagggtgaggatattgtcttcctggccactgatatcaatctgccaggggcggtggactgggtgatgatgcagtcctgttttggcttccactttatgcttgtgttggagaaacaggagaagtatgatggacaccagcagttctttgcaatcgttcagcttattggtacccggaagcaggctgaaaacttcgcgtaccggctcgagctaaacggtcacaggagacgacttacatgggaggctacaccgaggagcattcacgagggcattgcaacagcgatcatgaatagcgattgtctggtcttcgacacctcaatcgcccagcttttcgctgaaaatggcaatctgggtatcaatgtgaccatatcaatgtgt

SEQ ID NO: 33649 - DNA, 846 bp, synthetic construct
  misc_feature 1..846: note = Description of Artificial Sequence: Synthetic coding sequence
  source 1..846: mol_type = other DNA
atgagcaggcaaaccgctaccgctctgcctacaggcaccagcaagtgtccaccttcgcaacgcgtaccagccctgaccggtacaaccgcaagcaacaacgacctggccagtctcttcgagtgtccagtatgcttcgactacgtgctgcccccaatactccagtgtcaatcgggacacctggtctgcagcaactgccgccccaagttgacctgttgccctacctgcagaggaccactcggaagcattcgtaaccttgcaatggagaaagtcgctaacagcgtgctgttcccttgcaagtacgcctcgagtggatgtgagataactctccctcatacagaaaaagcagatcacgaggagttatgcgagtttaggccctacagctgcccgtgtccaggtgctagctgtaaatggcaaggatctctggatgcagtcatgccacaccttatgcaccaacacaagagcatcaccacacttcagggcgaagatatcgtcttccttgctactgatatcaaccttcctggcgctgtggactgggtgatgatgcaatcctgcttcggattccactttatgctcgtcctggaaaagcaggagaagtacgatggacaccagcagttcttcgctattgtccagctgatcggaacccggaaacaggcagaaaactttgcttataggcttgagttgaatgggcacaggcggcgcttgacgtgggaggctacacctcgcagcattcatgagggtattgcaacagcaattatgaattctgattgcctcgtgttcgacacaagcatcgcacagctttttgctgaaaatggcaaccttggaattaacgtgacaatatcaatgtgc

SEQ ID NO: 33650 - DNA, 846 bp, synthetic construct
  misc_feature 1..846: note = Description of Artificial Sequence: Synthetic coding sequence
  source 1..846: mol_type = other DNA
atgtcgagacagacggccactgcgttgcctaccggcacttctaagtgccctccatcccaacgcgtgccagcactgacgggaaccaccgcctctaacaatgatctcgcgagccttttcgaatgtcctgtgtgcttcgactacgtcctgccgccaatcctgcaatgccagagcggacatctcgtgtgctcaaactgccggccgaaactgacttgctgtccgacttgcagaggacctctcggttccatccggaacctggccatggagaaagtcgctaactcagtactcttcccctgtaagtacgcctcgtcgggctgtgaaattactttgccgcatacggaaaaggctgaccatgaggagttgtgcgaatttagaccatactcctgcccgtgcccgggggcgagctgcaagtggcaaggatcgcttgacgcggtaatgccacacttgatgcaccaacacaaatccataaccacccttcagggagaggatattgttttcctcgcaaccgacatcaacctgccgggtgctgtggactgggtgatgatgcagtcatgcttcggttttcacttcatgctcgtcctcgagaaacaggaaaagtacgatggacatcagcagttcttcgccattgtccaactgatcggaactcggaagcaggccgagaacttcgcttatcgtttggaactcaatgggcaccgcagacggctgacctgggaggctactccccgcagtatccacgaagggatcgctaccgcaatcatgaattcggactgcctggtgtttgatacctcgatcgcgcaactcttcgccgaaaatggtaatcttggcatcaacgtgaccatctcaatgtgc

SEQ ID NO: 33651 - DNA, 846 bp, synthetic construct
  misc_feature 1..846: note = Description of Artificial Sequence: Synthetic coding sequence
  source 1..846: mol_type = other DNA
atgtctcgccagacagccaccgcattgcctacaggcacatcaaagtgcccaccgtctcagagggtgccagccttgactggtacaaccgcaagtaacaacgacctcgcctctttgttcgagtgtcccgtttgttttgactacgtcctacctccaattctgcagtgccagagtggacacttggtgtgtagtaactgtcggcccaagttaacgtgctgccccacctgcaggggacctcttggaagcattcgcaatcttgcaatggaaaaagtggcaaatagtgtcctgtttccatgcaagtacgcctcctccggatgtgagataacattaccccataccgagaaagcagatcacgaggaactttgtgagtttcggccctattcctgcccgtgtcccggagcttcgtgcaagtggcaggggtcattagatgcggtgatgccacatctcatgcaccagcataagtcaatcactactttgcagggggaggacatcgtgtttctcgccaccgatatcaacctcccaggggccgtggattgggtcatgatgcagtcctgctttggatttcacttcatgctagtgctcgagaaacaggagaaatatgatggacaccagcaattttttgctattgtccagctcatcggcacccgaaaacaggcggagaattttgcgtaccggcttgagctgaacggtcataggagacgcctgacctgggaagccactccacggtccatccacgagggcatcgctacagctatcatgaattccgattgcctcgtgtttgatacatcaattgctcaactgtttgctgaaaacggtaacctggggatcaatgtcacgatctcgatgtgt

SEQ ID NO: 33652 - DNA, 846 bp, synthetic construct
  misc_feature 1..846: note = Description of Artificial Sequence: Synthetic coding sequence
  source 1..846: mol_type = other DNA
atgtctcgacagacggcaactgccctgcctaccggcaccagcaagtgtcccccgtcacagcgcgtcccagcacttaccggaactacagcctccaacaacgatttggcatctctgttcgaatgcccggtgtgcttcgactatgtgttacctcctatactgcaatgtcagagcggccaccttgtgtgctcaaattgtcgccctaagttaacgtgctgccctacttgccgaggccctcttggatctatcaggaaccttgcaatggaaaaggttgcgaattctgtgctgttcccctgtaagtacgcatcctctggctgcgagatcacgctacctcacaccgaaaaggccgaccacgaggagctctgcgagtttcgcccctattcctgcccatgcccaggcgcctcctgcaagtggcagggaagcctggatgccgtcatgcctcacctgatgcaccaacataaaagcatcaccacccttcagggcgaggacatagttttcctcgccacggatataaacctccctggcgccgttgactgggtgatgatgcagagctgtttcgggttccactttatgctcgtgctggagaaacaggagaagtacgacggacatcagcagttcttcgccatcgtccaactaatcgggaccagaaagcaggcggagaatttcgcataccggttggagcttaatggccatcgccgccgcctgacgtgggaagcaacaccccgatcaattcacgaggggatagcaacagcaattatgaacagtgattgcctggtcttcgatacatcaatagctcagttgttcgccgagaacggcaatttaggaatcaatgtcacaatctccatgtgc

SEQ ID NO: 33653 - DNA, 846 bp, synthetic construct
  misc_feature 1..846: note = Description of Artificial Sequence: Synthetic coding sequence
  source 1..846: mol_type = other DNA
atgtccaggcagacggccaccgcactgcccacaggtacatccaaatgtccccccagtcagcgcgtacccgccctaacaggaaccacagcctcgaataacgacctggcctcattatttgagtgcccagtctgttttgattacgttctgccccccattctccagtgtcaatctggccaccttgtgtgttctaattgcagaccaaaattaacttgttgtcctacctgtagggggccactgggatcaatccggaatctggcgatggaaaaagtcgcgaacagtgttttgtttccctgtaagtacgctagctcaggctgtgagatcacactgccacacaccgagaaggcagaccatgaagagttgtgtgagttccgaccttactcctgtccgtgccctggagctagttgtaagtggcaagggtccctggatgcagttatgccccacctgatgcaccaacacaaaagcataaccaccctccagggagaggacatagtattcctggctacagatatcaaccttcctggcgccgtcgattgggttatgatgcagtcatgcttcggtttccacttcatgctggtgttggaaaagcaggagaagtatgacggccatcaacagttttttgctatagttcaattaatcggcacacgcaaacaggccgagaactttgcctatcgcctggagctgaacggccacagaagacgcctaacctgggaggccaccccccgctctatccacgaagggatagctaccgccataatgaattcagattgtttggtcttcgacacctccatcgcacagttattcgcagagaacggcaatctcggaattaatgtgaccatcagtatgtgc

SEQ ID NO: 33654 - DNA, 846 bp, synthetic construct
  misc_feature 1..846: note = Description of Artificial Sequence: Synthetic coding sequence
  source 1..846: mol_type = other DNA
atgagtagacagactgcaacagccctgcccactgggacgtccaagtgccccccttcacagagagtgccagctctgactggcacgaccgcctcaaacaacgaccttgcttccttatttgagtgtcctgtgtgcttcgactatgtgctaccacccattctgcagtgtcagagcggccatttggtttgctccaactgccggcccaaattgacttgttgtccgacttgccgaggcccactaggatctatacgcaatctagccatggagaaagtggctaattcggtgctgttcccatgcaaatacgcttccagcgggtgtgaaataactttaccacatacggagaaggctgaccatgaggagctgtgtgaattcaggccctattcctgcccctgccctggagccagctgtaaatggcagggttcactggacgccgtgatgccacatctcatgcatcagcataaatctattaccactctacagggagaagacattgtgttcctcgctaccgacattaatcttcccggcgctgtcgactgggtgatgatgcagtcttgcttcggctttcactttatgctcgtcctggagaagcaggagaagtacgacggacaccagcagttttttgcaatcgtgcaattgattggcacacgaaagcaagccgagaactttgcataccggctggagttaaacggccacagacggcgccttacatgggaggctacacctcgttccatccatgagggtatcgccacggccattatgaattcggattgcctcgtttttgacaccagtatagcccaattgttcgcagagaacggaaaccttggtataaacgtgacgatttccatgtgt

SEQ ID NO: 33655 - DNA, 846 bp, synthetic construct
  misc_feature 1..846: note = Description of Artificial Sequence: Synthetic coding sequence
  source 1..846: mol_type = other DNA
atgtctcgacaaacagctactgcacttccaactgggaccagtaagtgcccgccttctcagagagtccctgccttgactggaaccactgcgagcaataatgacctcgcatctttgttcgagtgtcccgtctgttttgattacgtcctcccaccaattctgcagtgtcaatcagggcatttggtttgctctaattgcaggccaaaacttacttgctgtccaacatgccggggacctcttggttcaataagaaatctcgcaatggagaaagttgccaattccgttctattcccatgcaagtacgcttcctccggatgtgagataacccttccgcacaccgagaaagccgaccatgaagagttgtgtgagttccggccatattcttgtccctgcccaggagcatcctgcaaatggcagggaagcctcgacgcagtgatgcctcatctcatgcaccaacataagtcaattaccactctccaaggagaagacattgtattccttgcaactgatattaatctaccaggtgcagtcgattgggtaatgatgcaatcatgctttggattccactttatgctggttttggaaaaacaagaaaagtatgatggacatcaacaattctttgcaatagtacaacttattggaacaagaaaacaggcagagaactttgcatatcgactggaattgaatggacatcggcgacgattgacatgggaagctacgccacgctctatccatgaaggaattgccactgcaatcatgaactctgattgtttggtttttgacacatctattgcccagttgtttgctgaaaacggaaacctcggaattaacgtgacaatctccatgtgc

SEQ ID NO: 33656 - DNA, 846 bp, synthetic construct
  misc_feature 1..846: note = Description of Artificial Sequence: Synthetic coding sequence
  source 1..846: mol_type = other DNA
atgtcaaggcaaactgccactgctctgccaacggggacttccaaatgtcctcctagccagcgcgtgccagccctgactggaaccacggcatcaaacaacgacctggcgagcctttttgaatgtcctgtgtgttttgactatgtgctgccacctattctccaatgtcagtcaggtcatcttgtctgctcaaattgtagaccgaaacttacttgttgtccaacctgccgcggcccactggggagcatccgtaacctggcaatggaaaaggtggcaaactcggtgctgtttccctgtaagtacgccagctcgggttgcgaaatcactcttccgcacacggaaaaggcggatcacgaagagctctgtgagttccggccgtactcctgcccttgcccaggtgcctcgtgtaaatggcaaggttccctggatgcagttatgccgcaccttatgcatcagcataaatcgatcactaccctgcaaggagaagatatagtgttccttgcaactgatatcaatctccctggggccgtggactgggtcatgatgcaatcgtgcttcggcttccatttcatgctggtcctggagaaacaagagaaatacgacggtcaccaacagttctttgcaattgtccagctcataggaactcgaaagcaagcagagaatttcgcataccgtcttgaactgaatggccatcgcaggcgacttacttgggaggcaaccccacgaagcattcacgaaggtattgccactgctatcatgaactcggattgcctggtctttgatacctcgatagcccagctttttgcggagaacggtaaccttggtatcaacgtgaccatctctatgtgt

SEQ ID NO: 33657 - DNA, 846 bp, synthetic construct
  misc_feature 1..846: note = Description of Artificial Sequence: Synthetic coding sequence
  source 1..846: mol_type = other DNA
atgtcccggcagacagcgaccgcccttcctactggcacatcgaaatgcccccctagtcagcgggtgcctgcccttaccggaacaacagcctccaacaatgaccttgccagcctctttgaatgccccgtttgcttcgactatgtgctgcccccaatcctgcagtgtcaaagcgggcacctggtgtgctcaaattgccgaccaaagctcacctgttgtcctacctgcagggggcccttgggaagcattcgaaaccttgctatggagaaggtggcaaacagcgtgctgtttccatgcaagtacgccagctctggctgtgagatcactttaccgcacacagagaaggccgatcatgaggagctctgcgagtttagaccttattcatgtccctgccctggggccagttgcaagtggcagggcagcttagacgccgtcatgcctcatctgatgcatcaacacaagtcaataaccactctgcagggcgaggatattgtgttcttagctacggacatcaatctcccgggcgcggtggattgggttatgatgcagtcctgttttggcttccatttcatgctcgtgcttgagaaacaggaaaagtacgatggacaccaacagtttttcgccattgtgcagctcatcggcactcggaaacaagccgaaaatttcgcctacaggctggagctgaacggccacaggcgcagactgacttgggaggcaactccacgttctatccacgagggtatagctaccgctatcatgaactctgactgcctcgtttttgatacctccattgcacagttgttcgcagagaatggcaatctgggtattaacgttaccatttcgatgtgt

SEQ ID NO: 33658 - DNA, 846 bp, synthetic construct
  misc_feature 1..846: note = Description of Artificial Sequence: Synthetic coding sequence
  source 1..846: mol_type = other DNA
atgtcacggcaaactgccacagcccttcctaccggcacatccaagtgtcctcccagccagcgtgtgcctgccctaacagggacaacagccagcaacaacgacttggcatccctgttcgagtgtccagtctgtttcgactatgttctccctccaatcctgcagtgccagtccggccacttggtgtgctctaattgtcggcccaaactgacttgttgtcctacatgcaggggaccactcggcagcatccgaaatctagccatggaaaaagtggccaactctgtgctctttccttgtaaatacgcaagctcaggttgtgagattacactccctcacactgaaaaagcggatcacgaagagctgtgcgagttcagaccctattcttgcccgtgcccaggcgcgtcttgtaaatggcagggctcactcgacgccgttatgccccacctgatgcaccagcacaaaagtatcaccactctacaaggggaggatattgtttttttggccacagatatcaacctccctggcgccgtcgactgggtgatgatgcagtcctgtttcggattccacttcatgttggtattagaaaagcaagagaagtacgatgggcaccaacagtttttcgctattgttcagctcataggcacccgaaaacaggcggagaactttgcatatcggcttgagcttaacgggcaccgcaggcggctgacctgggaggcaactccccggagcatccacgagggcatagcaacagccataatgaattctgactgtctggttttcgatacttccattgcccagctgtttgcagaaaatgggaacctagggatcaatgtgacaatctcaatgtgc

SEQ ID NO: 33659 - DNA, 846 bp, synthetic construct
  misc_feature 1..846: note = Description of Artificial Sequence: Synthetic coding sequence
  source 1..846: mol_type = other DNA
atgtcgagacagaccgctactgcactgccaactggaacctccaagtgtccaccatcccaacgcgtcccagcattgactggtaccacggcatcgaacaacgatctggcatcgctgttcgaatgtcctgtgtgtttcgattatgtgcttcctcctatcctgcagtgtcagtccggtcatctcgtttgtagcaactgcagacctaagctgacctgttgcccaacttgtagaggtcctcttggttcgattcggaacctggcaatggaaaaagtcgccaattcggtgctgtttccatgcaaatatgccagctcaggatgtgaaattaccctgccacataccgaaaaagcagatcatgaagagctgtgcgagtttagaccttactcctgcccatgccccggtgcctcctgtaagtggcaaggctcactggatgcggtcatgccccatctcatgcatcaacacaagtcgattactacgcttcaaggcgaagatatcgtgtttctggcgacggacattaacctgcctggagcagtcgattgggtgatgatgcagtcctgttttggcttccatttcatgcttgtcctcgagaaacaggaaaagtacgatggacaccagcagttttttgcgattgtgcagctgatcggcacccgcaaacaagcagagaactttgcctacaggcttgagcttaacggtcatcgacggagacttacttgggaagcaactcctcggtcgattcacgagggaattgccaccgccattatgaactcggactgcctggtctttgatacctcgattgcgcaactgtttgccgaaaatggaaaccttgggataaatgtcaccatctcgatgtgt

SEQ ID NO: 33660 - DNA, 846 bp, synthetic construct
  misc_feature 1..846: note = Description of Artificial Sequence: Synthetic coding sequence
  source 1..846: mol_type = other DNA
atgtctcgccaaactgcgacggccctgcctactggcacctcaaaatgtcctccttcgcaacgcgtgcctgcccttactggcactaccgcttcaaacaacgatctggcatccctcttcgagtgtcctgtgtgcttcgactacgtgctgccccctatacttcaatgtcagtcgggacaccttgtgtgttccaactgcaggcctaaactgacctgttgtcctacctgtagaggtcctttgggttccattcgtaacctggcaatggagaaggtggcaaattccgtgctgtttccctgcaaatacgcaagctcgggttgtgaaatcaccctgcctcataccgaaaaagcagaccatgaggagctgtgcgagtttagaccatattcgtgtccttgtccgggtgcgagctgtaagtggcaaggaagcctggatgcagtcatgcctcaccttatgcaccagcacaaaagcatcactactcttcagggagaggatatagtgttcctggcaactgatatcaacctccctggtgcagtggattgggtcatgatgcagtcgtgctttggatttcacttcatgcttgttctggagaagcaggaaaagtacgacggacatcagcagttttttgccattgtccaactgattggaactcggaagcaagcagaaaactttgcataccgcctcgaactcaacggccatagacgacgcctgacctgggaagcgactccaagaagcattcatgaaggaattgcgactgcaataatgaattcggattgtctggtctttgacacctcaatcgctcagctgttcgcagaaaacggaaaccttggtatcaatgtcacgattagcatgtgt

SEQ ID NO: 33661 - DNA, 846 bp, synthetic construct
  misc_feature 1..846: note = Description of Artificial Sequence: Synthetic coding sequence
  source 1..846: mol_type = other DNA
atgtcgcgccaaaccgctaccgccctgccaactggtacctctaagtgccccccctcccagcgagtgcccgctctgaccggcaccaccgccagcaacaatgatttagcgagtttgtttgagtgccccgtgtgtttcgactacgtgctgcccccaatcctgcagtgccagagtggacacctcgtgtgtagtaattgtcggcctaaacttacgtgttgccccacttgtagagggcctctgggttcaattagaaacctggcaatggaaaaggtggcaaattctgtgcttttcccttgtaagtacgcttcaagtggatgtgaaattacgttgcctcacaccgagaaggccgatcacgaagagctttgcgaatttcggccctattcctgcccctgtcctggagcaagctgtaagtggcagggatccctagacgctgtcatgccccatctgatgcaccagcacaaaagcattactactctccagggcgaggacatcgtattcttagctaccgatatcaatctgccgggcgctgttgactgggtaatgatgcagtcctgctttgggttccattttatgcttgtcctggaaaagcaggagaaatacgacgggcaccagcagtttttcgccatcgttcagctgatcggtacaaggaaacaggccgagaacttcgcttacaggctggagttgaacggacatagacggcggctgacgtgggaggctacccctaggtccatccacgagggcatagccacagccatcatgaacagcgactgtcttgtgtttgatacgtcaattgcccagctgttcgcagagaacggcaatctgggcattaacgttacaataagtatgtgc

SEQ ID NO: 33662 - DNA, 846 bp, synthetic construct
  misc_feature 1..846: note = Description of Artificial Sequence: Synthetic coding sequence
  source 1..846: mol_type = other DNA
atgtccaggcaaaccgcgacggccttgccaacggggacttcgaaatgcccgcctagccaaagagtgccggccctcactggaaccaccgcctctaataacgacctcgcctccctgttcgagtgccctgtgtgcttcgattacgtgttgccgcctattctgcagtgccagtctggacacctcgtctgctccaattgccgcccaaagctcacctgttgtcccacctgcagaggcccgctgggctcgatccggaacctggccatggagaaggtggctaacagtgtgctttttccgtgtaagtacgccagctcgggatgcgaaatcaccctgccgcacactgaaaaagcagatcacgaagagttgtgtgaattccgcccttactcgtgcccatgcccgggagcctcctgcaagtggcaaggatcgctggatgcagtcatgccacatcttatgcaccaacataagagcatcactaccctgcagggcgaggacatcgtgtttctggcaaccgatatcaatctcccgggcgccgtggactgggtaatgatgcagagctgcttcggtttccatttcatgctggtgttggagaaacaggaaaagtacgatgggcaccaacaattcttcgctattgtccagctcatcggaactcgcaaacaggcggaaaacttcgcctaccggctcgagctcaatgggcacagacggcggttgacttgggaagccactccacggtccattcacgagggaatcgcgactgcgatcatgaacagtgattgtctggtgtttgatacgagcatcgcccagttgtttgccgagaacgggaacctcggaatcaatgtgacgatctcgatgtgc

SEQ ID NO: 33663 - DNA, 846 bp, synthetic construct
  misc_feature 1..846: note = Description of Artificial Sequence: Synthetic coding sequence
  source 1..846: mol_type = other DNA
atgtccaggcaaaccgcaactgccctgcctacaggtacatctaagtgtcctccatcccaaagagttccagctcttacaggtacgactgcatccaacaacgatttggccagcctgttcgaatgccccgtctgcttcgattacgttctgcctccgatcctgcagtgccaatccggtcacctggtctgtagtaattgtagacccaaactcacttgctgccctacatgtaggggacctttgggctccattcgcaatcttgcgatggagaaggtagctaactctgttttgtttccctgtaagtatgcctcatcaggatgcgagatcacccttccacacactgaaaaggctgatcacgaagagctttgtgaatttaggccatacagctgcccctgtcctggtgcgagttgcaaatggcaaggttcattggatgctgtcatgcctcacctcatgcaccagcacaaaagtatcacgaccctccagggcgaggacattgtcttcctggctactgatataaatctccctggagctgtggactgggtgatgatgcagtcttgtttcggattccacttcatgttggtgctcgaaaagcaggaaaaatatgatggacatcagcagttttttgctatagtgcagctgatcggaaccaggaagcaagctgagaacttcgcctaccgcctcgagctgaacggccacagacgcagactgacctgggaagccactcctcgctccatccacgagggaatcgccactgccatcatgaactccgattgcctcgtttttgatacatctatcgcacagctcttcgctgagaacggaaacctgggaatcaacgtcacgatcagcatgtgc

SEQ ID NO: 33664 - DNA, 846 bp, synthetic construct
  misc_feature 1..846: note = Description of Artificial Sequence: Synthetic coding sequence
  source 1..846: mol_type = other DNA
atgagtaggcagactgccactgcgctgcccacaggaacatctaaatgtccccccagtcagcgggtgccggctttaacagggacgacagcctctaataacgatctggcttccctgtttgaatgccccgtgtgcttcgactatgttcttcccccaattcttcagtgtcagtccggacacctcgtgtgtagtaactgtcggcccaaactaacatgttgccctacttgtaggggacccctcggatccattcggaaccttgctatggaaaaggttgctaattctgtgctgttcccttgcaagtacgcctcgtccgggtgtgaaatcactctacctcatacagaaaaagctgatcatgaggaactatgcgagtttcggccttacagttgtccttgccccggagcatcatgtaaatggcaggggtccctcgatgctgtgatgcctcacctcatgcatcaacataaatcgataacaacactccagggggaagatatagtattcttagccacagatattaatctacccggggctgttgactgggtcatgatgcagtcatgttttggattccactttatgcttgttctagagaaacaggaaaaatacgatgggcaccagcagtttttcgccatcgtccagctaatcgggactaggaaacaggcggaaaatttcgcctatcggctcgaactgaacggacacaggcgcaggctcacatgggaagccacaccaagatcgatccacgaaggaattgcaacagctatcatgaattctgattgtttagtatttgatacatctatcgcacagctgtttgccgagaatggaaacctgggaatcaacgtgactataagtatgtgt

SEQ ID NO: 33665 - DNA, 846 bp, synthetic construct
  misc_feature 1..846: note = Description of Artificial Sequence: Synthetic coding sequence
  source 1..846: mol_type = other DNA
atgagcaggcaaactgctacggcgctccccaccggcaccagcaagtgtccaccatctcagcgtgtaccggcgctgacggggacaactgcctctaataacgacctggcaagcctgtttgaatgccctgtgtgtttcgattacgttctgcctcctatcctgcagtgtcagagtgggcacctggtctgcagcaattgtcgccctaagttgacctgttgtcctacgtgtcggggcccgctgggttccatccgcaatttggccatggagaaggtggccaactccgtgttgtttccgtgcaagtatgcgtcgagtggttgcgaaatcaccctgcctcacaccgagaaggccgaccacgaagaactgtgcgagttccgcccatatagctgcccatgtcctggcgcaagctgtaagtggcaaggttcattggatgcggtaatgccacacttgatgcaccaacataagagtataactaccctgcaaggcgaagatatcgtgtttctcgcaacggacatcaatttgccaggcgccgttgattgggtgatgatgcagagctgtttcggctttcattttatgctggtgctggaaaaacaagagaaatatgatggccaccaacaattttttgctatcgtgcagctgatcggcacccggaagcaagctgaaaacttcgcctaccgcctggaacttaatggacataggcgtaggttgacttgggaagcgactcctcgttccatccacgaaggtattgcaaccgcaatcatgaatagcgattgtctcgtgtttgacacaagcattgcgcagctctttgcggagaatgggaacctgggcataaacgtcaccatctctatgtgc

SEQ ID NO: 33666 - DNA, 846 bp, synthetic construct
  misc_feature 1..846: note = Description of Artificial Sequence: Synthetic coding sequence
  source 1..846: mol_type = other DNA
atgtctcgccaaacggcgaccgcgctcccaaccggtacctcgaagtgcccccctagtcagcgggtccctgcactgacgggcaccaccgcctccaataacgacctggccagtctctttgaatgcccggtgtgcttcgattacgtgttgccccctattctccagtgccaaagcggacacctggtgtgttcgaattgccgcccgaagttgacctgttgccctacttgtcgggggccactgggctccatccgtaacctggcgatggaaaaggtcgccaatagcgtcctcttcccctgcaagtacgcatcgtcaggatgtgagatcactcttccgcacactgaaaaggcggaccacgaggagctctgtgagttcaggccttactcgtgtccgtgccccggagcgtcgtgcaaatggcagggcagcctggacgccgtgatgcctcacttgatgcatcagcataagtccatcaccacgttgcaaggagaagatatagtgttcctggccactgatatcaacctgccgggagctgtggattgggtgatgatgcaaagctgcttcggtttccactttatgctcgtgctggagaagcaggaaaagtatgacggccatcagcagttcttcgcaatcgtgcagctgatcggaaccaggaaacaagcagagaacttcgcctaccgcctcgaactcaatggccatagacggcggctcacttgggaggctacgccaagatccattcatgagggaattgctaccgccatcatgaactcagactgcctggtctttgacacttcgatcgcacagctgttcgccgaaaatggaaacctcggtatcaacgtaactatctccatgtgc

SEQ ID NO: 33667 - DNA, 846 bp, synthetic construct
  misc_feature 1..846: note = Description of Artificial Sequence: Synthetic coding sequence
  source 1..846: mol_type = other DNA
atgtcccgacagaccgccacagccctccctacaggtacgtctaaatgtcccccgtcccagagagttccggccctcaccgggacaaccgcatcgaataacgatctcgctagtctattcgaatgtcccgtgtgtttcgattacgttcttccaccaattcttcagtgccaatctgggcatttggtctgctcaaattgcaggcccaaacttacttgctgccctacatgccgagggcctctgggctctatccgtaacctggccatggagaaggttgccaactctgtgttgttcccctgtaaatatgccagttccggttgcgagataacccttcctcacactgagaaggctgaccatgaagaattatgcgagttccgcccttattcctgcccttgtccgggggcatcttgcaagtggcagggctctctcgacgctgttatgccccacctgatgcaccagcataagtccatcaccaccctgcaaggtgaagacattgtcttcctggccactgacatcaacctccccggggctgttgattgggtgatgatgcaatcctgcttcggcttccacttcatgctggtgctggagaaacaggagaagtacgacggccaccagcagttctttgcaatcgtgcaactgatcggcacacggaagcaggctgagaattttgcttaccggctggaattgaatgggcataggcgaaggctaacctgggaggccacacctagatcaatccacgagggtattgccactgcgattatgaactccgactgtctggtgtttgacacctcaattgcacagctgtttgccgagaatggtaacctggggatcaacgtgactatttccatgtgc

SEQ ID NO: 33668 - DNA, 846 bp, synthetic construct
  misc_feature 1..846: note = Description of Artificial Sequence: Synthetic coding sequence
  source 1..846: mol_type = other DNA
atgtctcgacaaaccgccaccgccctccccaccgggacctccaagtgccctcccagccagagagtgcctgctttgactggaacaactgcgtccaataatgacctggcatccctttttgagtgccctgtctgcttcgattacgtgctgccacccatcttacaatgccaaagtggacacctggtttgcagcaattgtcggccgaaattgacatgttgtccaacttgtcgaggacccctcggttcaattcgcaatttagctatggagaaggttgctaacagtgtcttgttcccgtgcaagtatgccagttctggctgcgaaattaccctacctcacactgaaaaggctgatcacgaggagctgtgcgaatttcgaccctacagttgtccctgcccaggggccagctgtaagtggcagggatctttggacgcggtgatgccgcatctgatgcaccagcataagtccatcactaccctacaaggagaggacatcgtgttccttgccactgatatcaacctgcctggcgccgttgattgggtgatgatgcagagttgcttcggatttcattttatgttagtactggagaaacaggagaagtatgacgggcaccagcaattcttcgccatcgtacagctgatcggcacacgtaaacaggcagaaaacttcgcttaccgattggagctgaatggccaccgacgacgattgacttgggaagccaccccaaggtcaatacacgagggtatcgctacggctatcatgaactcagattgtctagtgtttgacacttcaattgcgcagctgtttgccgagaatgggaatcttgggattaatgtgaccatttcaatgtgt

SEQ ID NO: 33669 - DNA, 846 bp, synthetic construct
  misc_feature 1..846: note = Description of Artificial Sequence: Synthetic coding sequence
  source 1..846: mol_type = other DNA
atgagcaggcagactgcgactgcccttccgactgggacctcgaagtgtccgccgtcgcaacgagtgccggcgctgactggaaccactgcgtcgaacaacgacctggcgtctcttttcgaatgtcccgtctgttttgattacgtcctgcctcccatcctccagtgccaatcaggacacttggtgtgtagcaactgcagacctaagctcacgtgctgccctacctgccgcggaccgctcggttcaattcgaaatctcgccatggagaaagttgctaatagcgttctgttcccgtgtaagtacgcaagctccggatgcgaaattactttgccacacaccgagaaagcggatcatgaggaactgtgcgaattccgcccgtactcttgcccatgtcccggcgcctcctgcaagtggcaaggatcgctcgacgcggtcatgccacaccttatgcaccaacacaagtcgatcactactttgcagggtgaagatattgttttccttgcaaccgacatcaatctcccgggagctgtggattgggtgatgatgcaatcctgctttggattccacttcatgttggtgctggagaagcaggaaaagtatgacggtcaccagcaattctttgccatcgtgcagctgataggtacccgtaagcaggctgagaactttgcctaccgccttgagctcaatggacacagacggagactgacttgggaggctacgccgcggtccatccatgaaggaatcgccaccgctatcatgaacagcgactgtctcgtctttgacacctcgatcgcgcagctgttcgccgaaaatgggaacctgggcatcaacgtgaccatctccatgtgt

SEQ ID NO: 33670 - DNA, 846 bp, synthetic construct
  misc_feature 1..846: note = Description of Artificial Sequence: Synthetic coding sequence
  source 1..846: mol_type = other DNA
atgtccagacagactgccacagctttacccaccggcactagtaaatgccccccatcccagcgagtccccgcactgaccggaacgaccgcttcaaataatgacctggctagcctgtttgagtgcccagtgtgcttcgattacgtgctgccccctatactccagtgtcaaagcggccatctggtctgcagtaattgcagaccgaaactgacatgctgccctacttgccgagggccactggggtctattaggaatctggctatggaaaaggttgccaacagcgtgctcttcccttgtaagtacgcctcctcaggctgtgagatcacactgcctcacaccgaaaaagcagatcatgaggagctgtgcgaattcagaccgtactcttgtccttgcccaggcgcctcttgcaaatggcagggcagcctggatgcggtgatgccccatctaatgcatcagcataagagcattactaccctgcagggagaggacatcgtgttcttagccactgacattaacctgcccggcgccgtggattgggtgatgatgcagagttgttttggcttccacttcatgctcgtccttgaaaagcaggagaaatacgacggacatcagcagttcttcgctatcgtgcagctcattggtacacggaagcaggccgaaaattttgcctaccgcttagagctgaacggccacagacgcaggttgacttgggaggccacaccccggagcattcacgagggtattgccaccgcaatcatgaactctgactgtctggtgtttgatactagtattgcacagctttttgccgagaatggcaacctcggtattaacgtgaccatctcaatgtgt

SEQ ID NO: 33671 - DNA, 846 bp, synthetic construct
  misc_feature 1..846: note = Description of Artificial Sequence: Synthetic coding sequence
  source 1..846: mol_type = other DNA
atgtcccggcagaccgctacggcactgcctaccgggacgagcaagtgcccaccatcccaaagggtgcccgcactgaccggaacaacagcatctaacaacgacctggcctctctgttcgagtgtccggtctgcttcgattatgtgctgccacctattttgcaatgccagtcaggacacctcgtttgctccaattgcagacctaagctcacatgttgtcccacttgccggggtcccctcggatctatcaggaacctcgccatggagaaagtcgcgaattcagtactgtttccatgtaagtacgcttcttctggctgtgagatcaccctccctcatacggagaaggccgatcatgaggaactgtgcgagttccggccatacagttgcccctgtccaggcgcttcctgcaagtggcaagggagtctcgatgctgtgatgccccacttgatgcaccagcacaaaagtattacaacgctgcaaggcgaggatatcgtgtttcttgccacagatatcaatctcccaggagccgtagattgggtaatgatgcagagctgcttcggcttccattttatgctcgtcctggagaaacaggagaagtatgacggtcatcagcagtttttcgcaatcgttcagctgatcgggactcgaaaacaggcggagaacttcgcttatcggctggaattgaatggccataggcgccgactgacctgggaagccactcccaggtcaatccatgagggcatagccacagctattatgaattcagactgcctggtgttcgataccagcattgcacagctgtttgccgaaaatggcaatctgggcatcaatgttacaattagcatgtgt

SEQ ID NO: 33672 - DNA, 846 bp, synthetic construct
  misc_feature 1..846: note = Description of Artificial Sequence: Synthetic coding sequence
  source 1..846: mol_type = other DNA
atgtcaaggcagactgccacagcccttcccacagggacatcaaaatgccctccgtcacagagggttcccgctctgacagggacaactgcatctaataacgatctggcctccttgttcgaatgtccagtgtgctttgattatgtgctccctccaatccttcagtgccagtctgggcacctggtgtgctccaattgcagacccaagctgacatgttgtccaacatgtaggggacccctagggtccattagaaatctcgctatggaaaaagtggccaattctgtactcttcccatgcaaatacgcgtcaagtgggtgtgagattacactaccacacactgaaaaagcagaccatgaagaactatgcgaatttaggccttattcatgtccctgtcctggggcttcctgtaaatggcagggatcccttgatgctgtaatgccacaccttatgcaccagcataagtccataacaacacttcagggggaagatattgtattcctggcgactgatataaaccttcccggagcagtggattgggtgatgatgcaatcatgctttggattccactttatgctggtgctcgagaaacaagaaaagtatgatgggcatcagcagttcttcgcaatcgtccagttgatagggacacggaaacaggctgaaaattttgcctatcggctagaactcaatgggcatcgacgcaggctaacgtgggaagcgactccaagatcaatacacgaagggatagcaactgcaattatgaattccgattgtctggtgtttgatacttccatcgctcagctgttcgccgaaaacggaaacttaggaattaacgtaacaatctccatgtgt

SEQ ID NO: 33673 - DNA, 846 bp, synthetic construct
  misc_feature 1..846: note = Description of Artificial Sequence: Synthetic coding sequence
  source 1..846: mol_type = other DNA
atgagccggcagacagcaacagccttgcccaccggaacgtcaaagtgcccccccagtcagcgagttccggcactgacaggaactacggcctccaacaacgacctggctagtctgttcgaatgccccgtgtgcttcgattacgtcttgcccccaatcctccagtgccagagcggacacctcgtttgtagcaattgccgcccaaagctgacctgctgcccgacttgcaggggtcctcttggtagtatacgtaatctggccatggaaaaagtagcaaactcggtgctattcccgtgtaagtacgctagctcaggctgcgagattacgttgccacatacagagaaggcggatcacgaggagctgtgtgaattccgaccgtactcctgtccgtgtccgggagcttcgtgcaagtggcaaggtagcttggacgcggttatgccccatctgatgcatcagcataaatccatcaccacgctgcagggtgaggacatcgtgttcttagcaaccgatatcaacctgccgggagctgtcgactgggttatgatgcaaagctgcttcggtttccacttcatgctagtcctcgaaaagcaggagaaatacgatggccatcagcagttcttcgcgatagtgcagctcattggtacgcggaagcaggcagaaaacttcgcatataggctggaattgaacggtcatcgtcgaaggctgacctgggaagccactccgcgctccattcacgagggaatcgctaccgccatcatgaactctgattgcctagtcttcgacacctccattgcccaactcttcgccgagaatggcaacctgggcatcaacgttacaataagtatgtgc

SEQ ID NO: 33674 - DNA, 846 bp, synthetic construct
  misc_feature 1..846: note = Description of Artificial Sequence: Synthetic coding sequence
  source 1..846: mol_type = other DNA
atgagccggcagacagcaaccgcacttcccaccggcaccagtaagtgccctcctagccagcgggtgccggccctcacaggcaccaccgcctccaataacgacctagctagcctatttgagtgtccggtctgtttcgactacgtcctgccccctatactgcagtgtcaaagcggacatctggtgtgtagtaactgtaggccaaagttaacatgttgtcccacctgcagggggccattaggatccattcggaatctcgcgatggagaaagtggcaaacagcgtcctctttccctgcaaatacgcctccagtggatgtgaaattactttgccgcatactgagaaggctgaccatgaggaactttgcgagttccggccatactcctgcccctgccctggagcgagttgcaaatggcagggttcactcgacgccgtcatgccacaccttatgcatcagcacaagagcatcacaaccctccagggagaggacatcgtcttcctggctaccgacatcaacctcccgggggccgtggattgggtgatgatgcagtcttgtttcggttttcacttcatgttggttctcgagaagcaggagaaatacgacggccaccaacagtttttcgccatcgtccagctgataggcactaggaagcaagccgaaaattttgcctatcgactggagctgaacggccaccggcggcggctgacatgggaagccaccccaagatctatacatgaaggtatcgctaccgctatcatgaattcggattgtctggtgtttgacacgtccattgcgcagcttttcgctgagaatgggaacctcggcatcaatgttactatttcgatgtgc

SEQ ID NO: 33675 - DNA, 846 bp, synthetic construct
  misc_feature 1..846: note = Description of Artificial Sequence: Synthetic coding sequence
  source 1..846: mol_type = other DNA
atgagccgtcagactgcaacggctcttcctaccggaacgtccaagtgtccaccatctcaaagagtccccgcactcactggtaccaccgcgtcaaacaacgatctcgcatccctctttgaatgtccggtctgttttgattacgtgctgccccccattcttcagtgtcaatcgggacatctggtctgtagcaattgcagaccaaagttgacctgctgtcctacctgtcgtggccctcttggttcgataagaaaccttgccatggagaaagtggcaaatagtgtcctctttccttgtaaatacgcgtcgagcggatgcgaaatcactctgccacataccgagaaagcggatcacgaagaactgtgcgagttccggccatattcttgtccttgccctggtgcctcgtgtaagtggcaggggtcgcttgacgccgtgatgccgcatctgatgcaccagcacaagagtatcaccactctccaaggcgaagatatcgtgttcctggcaactgacattaaccttcctggtgccgtggactgggtgatgatgcaatcttgctttggatttcatttcatgcttgttctggaaaagcaagaaaagtacgatggacatcagcaattcttcgcaatagtgcagctgatcggtacgcgaaagcaggctgagaacttcgcataccgcctggaactgaatggacataggcggcggctgacttgggaagcgactccacgatccattcacgaggggattgcaaccgcaattatgaacagcgactgcctcgtgtttgatacttccattgcgcaattgtttgcagaaaatgggaaccttggcattaacgtgaccatctcgatgtgc

SEQ ID NO: 33676 - DNA, 846 bp, synthetic construct
  misc_feature 1..846: note = Description of Artificial Sequence: Synthetic coding sequence
  source 1..846: mol_type = other DNA
atgtcccgccaaacagccactgccctaccgactgggacctccaaatgccctccaagtcagcgggtgccggccctcacaggtactactgctagtaacaacgatctcgcaagcttattcgaatgtccagtatgttttgattatgtcctcccgccaatcttgcagtgccaaagcggccacctggtttgctccaactgcagaccgaagctgacctgctgccctacttgtaggggtccactcggctcaataaggaacctggcaatggagaaagtggctaactccgtcctgtttccgtgtaagtacgcatcctctggctgcgagattactctccctcacactgagaaggcggatcacgaggagctgtgcgaattccgcccttattcctgcccatgccccggggcctcctgcaagtggcaaggctcacttgacgcagtcatgccacacctgatgcaccagcacaaaagcatcacaaccctacagggagaagacatcgtgttccttgccacagatattaacctccctggagctgtcgactgggtgatgatgcagagctgtttcggatttcatttcatgctcgtgctcgagaagcaggaaaagtacgatggccaccagcagttcttcgctatagtgcagctgattggcactcgcaaacaggctgagaactttgcgtatcgacttgaactcaatggccatcgtcgaagattgacgtgggaagctaccccccggtccatacatgaggggattgctacagctatcatgaatagcgattgcttagtgttcgacacctcaattgcccaactgtttgccgaaaacggcaaccttggcataaatgtgaccatttcaatgtgc

SEQ ID NO: 33677 - DNA, 846 bp, synthetic construct
  misc_feature 1..846: note = Description of Artificial Sequence: Synthetic coding sequence
  source 1..846: mol_type = other DNA
atgtcacggcagaccgccactgccctaccaaccggcactagcaagtgtcctccatcccagcgggtacctgcacttaccggtactactgcctccaataatgacctggcctcgctgtttgagtgcccagtgtgttttgactacgtgctaccacctatcctgcagtgtcaaagtgggcacttggtctgctccaattgccgacccaaactaacttgctgtccaacttgccgtgggccacttggaagcatcaggaatctggcaatggaaaaggttgcaaattctgtattgttcccctgcaaatatgcctcctccggatgcgaaatcactctgccgcatactgagaaggccgaccacgaggagctgtgtgaattccgaccatattcatgtccctgtccaggcgcctcttgcaagtggcagggtagcctggacgccgtgatgccgcatctgatgcaccaacataagtccatcaccaccctgcagggggaggatattgtttttcttgcgacagacattaatctccccggggctgtcgactgggtgatgatgcaatcttgtttcggcttccatttcatgctcgtgttagagaagcaagagaagtacgatgggcatcaacagtttttcgcgatagtacagttaatcggcacacgaaagcaggcagaaaactttgcctaccggttagagctcaatgggcacagacgacgcctgacatgggaagccacacctagatccattcacgagggtattgcgacagcaatcatgaactctgattgtctcgtcttcgatactagcattgcccagctgttcgcagagaatggcaacttgggaatcaatgtgactatctctatgtgt

SEQ ID NO: 33678 - DNA, 846 bp, synthetic construct
  misc_feature 1..846: note = Description of Artificial Sequence: Synthetic coding sequence
  source 1..846: mol_type = other DNA
atgtctagacagacagctactgcactgcccactggcacatccaagtgccctccgagtcaaagggtgccggccctgactgggacaaccgcgtctaataacgacctcgcctcactctttgagtgccccgtgtgtttcgattacgttctcccacctatcctccagtgtcagtccggtcatcttgtctgttccaattgccggcctaaactgacgtgttgccccacgtgcagggggcctctgggttccataaggaacttggccatggaaaaggtggcaaacagcgtgctgtttccatgcaagtatgcttcgtcaggctgtgaaattacgttgccccacaccgagaaggcagaccacgaagagctctgcgagtttcgtccctactcctgtccttgcccaggtgcttcatgcaagtggcagggtagtctcgatgccgtcatgccgcacttaatgcatcagcataagtctataacaaccctacagggcgaggacattgtgttcctcgcaactgatatcaacctccccggggcagttgattgggtaatgatgcaatcatgtttcgggtttcactttatgctagttctggaaaagcaagagaagtacgacggccatcagcagtttttcgctattgtgcaattgatcggaacaaggaagcaggctgaaaatttcgcgtaccggttggagctgaacgggcaccggaggagactgacttgggaggcaaccccacgctccattcatgagggcattgccacagccattatgaacagcgactgcctggtgttcgacaccagcatcgcccagctgtttgccgagaacggcaatttaggcattaatgtgacaatctcaatgtgc

SEQ ID NO: 33679 - DNA, 846 bp, synthetic construct
  misc_feature 1..846: note = Description of Artificial Sequence: Synthetic coding sequence
  source 1..846: mol_type = other DNA
atgagccggcagaccgccactgccctgccgactggaacctcaaagtgccctccgtcccaacgcgtcccagccctgaccggcacgaccgcatccaataacgaccttgcaagcctgtttgaatgtccagtgtgcttcgattacgtgctgccgcctatcctgcagtgtcagtccgggcacctggtgtgcagcaactgcaggccgaaactgacctgctgccccacctgcagaggccctctgggctcgatccgcaatctcgctatggagaaggtggcgaatagcgtgctcttcccatgtaagtacgcctcttccggatgcgagatcaccctgcctcacactgagaaagcagaccatgaagaactgtgcgaattcagaccatacagctgcccctgtccgggcgcctcctgcaaatggcagggatccctcgatgccgttatgccgcatctgatgcaccagcataagagcatcaccactcttcagggagaagatatcgtgttccttgcaactgacataaacctgccgggtgctgttgactgggtgatgatgcaaagctgctttggctttcactttatgttggtgctggaaaagcaagagaaatatgatggccaccagcagtttttcgctatcgtgcaactcatcggcactagaaagcaggcggaaaacttcgcctaccgcctggagctgaacgggcaccgccgtcgccttacgtgggaagctaccccacgctcgattcatgagggcatcgcaaccgcgatcatgaactccgactgcctggtgtttgacacctctatcgcccagctgttcgctgaaaacggtaacctgggaattaacgtgacgatctcgatgtgt

SEQ ID NO: 33680 - DNA, 846 bp, synthetic construct
  misc_feature 1..846: note = Description of Artificial Sequence: Synthetic coding sequence
  source 1..846: mol_type = other DNA
atgtcaaggcaaaccgcaactgccctgcctaccggcaccagcaagtgcccgccatctcagcgcgttccggccctcaccggcaccacggcgtcaaacaatgatctggcatcgctcttcgaatgcccggtgtgtttcgactatgtgctgcctcccattctccagtgccagtccgggcatctcgtgtgttccaactgtcgccccaagctcacctgctgccctacttgccggggaccgcttggttcaatcagaaacctggcgatggaaaaggtggcgaacagcgtgctgttcccgtgtaagtacgcgtcctccggatgcgaaatcactcttccccacacggaaaaggctgatcacgaggaactgtgcgagttccggccatactcgtgcccgtgcccgggcgcatcttgcaagtggcaaggttcacttgacgcggtcatgcctcacctcatgcatcaacacaaatccatcaccacgctgcagggagaggatatcgtctttctggcgactgacataaatctgccgggggctgtcgactgggtcatgatgcaatcctgcttcggcttccacttcatgctggttctggagaaacaggagaaatacgatgggcatcagcagttttttgcgatcgtgcaactgatcggaactcggaagcaggcggagaattttgcctaccgcctggagttgaatggacaccggcgccgcctgacgtgggaagccaccccaaggtctatacatgaaggaattgcaactgccatcatgaactcggactgtctggtgttcgacacttcaatcgcccaattgttcgccgaaaacggtaaccttggaatcaatgtgaccatctcgatgtgc

SEQ ID NO: 33681 - DNA, 846 bp, synthetic construct
  misc_feature 1..846: note = Description of Artificial Sequence: Synthetic coding sequence
  source 1..846: mol_type = other DNA
atgtctagacagaccgctacggcgctgccaaccggaacaagcaagtgtccgccaagtcagagggtgccggcgctcacaggaactactgcaagcaacaatgacctggcctcactgttcgagtgcccggtatgcttcgactacgtactgcctccgattcttcagtgtcagtctggtcacctggtatgtagcaactgtcggccgaagctgacttgttgtccgacctgcagagggcccctgggctctataagaaatttggccatggagaaggtggcgaactcagtgctttttccctgtaaatatgcttccagcgggtgcgagattaccctgccccacacggagaaggctgaccacgaagagctgtgcgaattcaggccgtactcctgtccttgtccaggagcctcctgcaaatggcaaggctcccttgatgctgtaatgccacacctgatgcaccagcataagtcaatcaccaccctgcagggcgaggatattgtgtttctggccactgacatcaatctgcctggggcggttgactgggtgatgatgcagagttgctttggctttcatttcatgctggtcttggagaagcaggaaaagtacgatggacaccagcagttttttgcaattgttcagttgatcggaactaggaaacaggctgagaactttgcctatcgactggaactgaatggtcatcgccggcgcctgacctgggaagccactcctaggtcaatccacgaaggaatagccacagctattatgaatagcgactgtctggtatttgatacctctattgcacagctgttcgctgagaatggaaacctggggattaacgtcaccatcagtatgtgt

SEQ ID NO: 33682 - DNA, 846 bp, synthetic construct
  misc_feature 1..846: note = Description of Artificial Sequence: Synthetic coding sequence
  source 1..846: mol_type = other DNA
atgtcacggcaaactgccaccgcactgcctacgggtacaagcaagtgtccaccttctcagcgcgttccagcactgactggaacgacagcttccaataacgacctcgcttcactttttgaatgtccagtttgcttcgactacgtcctgcctccgattttacaatgccagagtgggcatctggtctgctctaactgcagacccaagctcacctgttgtcctacctgtcgcggaccactgggtagcatcaggaacctcgctatggagaaagtggcgaactcagttttgtttccctgcaaatacgccagcagtgggtgcgaaataaccctcccccataccgagaaagcggaccatgaggagctgtgtgagttccgcccttacagctgtccgtgcccaggcgccagctgtaagtggcaagggagcctagatgccgtcatgcctcatcttatgcaccagcacaaatcaataacgacactgcagggagaggatatagtattcctagctacggacattaatttgcctggagccgtggactgggtgatgatgcagtcctgttttgggtttcacttcatgttagtcttggagaagcaggaaaagtatgacggtcatcagcaatttttcgctatcgttcagctgatcggaacccggaagcaggcagagaatttcgcttatcggctcgagctgaatggccaccgcaggcgattgacctgggaggcgacacctcggtccatccacgaaggcatcgcaaccgccatcatgaattctgactgcctggtgtttgacacaagtatagcacagctatttgctgagaacggcaaccttggcatcaacgtaacgatctcaatgtgc

SEQ ID NO: 33683 - DNA, 846 bp, synthetic construct
  misc_feature 1..846: note = Description of Artificial Sequence: Synthetic coding sequence
  source 1..846: mol_type = other DNA
atgtcgcgccagactgcgactgccctgccgactggcacttcaaagtgcccacctagccagagggttccggcgctcaccgggaccactgcctccaacaacgacctcgcctccttgtttgagtgtcccgtgtgcttcgactatgtcctcccgcccattctgcagtgccagtcagggcacttggtgtgtagcaattgccggccgaagctgacctgctgcccgacctgccgcgggccactcggttcgattagaaatctggcgatggagaaggtcgctaacagcgtgctgttcccttgcaagtacgcttccagcggatgtgaaatcaccctgccgcacactgaaaaagccgaccacgaggaattgtgcgagttccggccgtacagctgcccttgcccgggagccagctgcaaatggcaggggagtttggatgctgttatgccgcacctgatgcatcaacataaatccatcactaccctccaaggtgaggacatcgtgtttctcgccactgatatcaacttgcctggcgccgtggactgggtcatgatgcagtcgtgtttcggattccatttcatgttggtgctggaaaagcaggagaagtatgatggacaccaacagttctttgcaatcgtgcaactcatcggaacccgtaagcaggctgaaaacttcgcctacagactggagctcaacggacaccgcagacggctcacttgggaggccactccgcgctcaatacacgagggcatcgcaacggcgatcatgaactccgactgccttgtgttcgatacttccatcgcacagctctttgcggaaaacggcaacctgggaatcaatgtcaccatcagcatgtgc

SEQ ID NO: 33684 - DNA, 846 bp, synthetic construct
  misc_feature 1..846: note = Description of Artificial Sequence: Synthetic coding sequence
  source 1..846: mol_type = other DNA
atgtctcgccagactgcaactgcactgcctaccggcaccagcaagtgcccacctagccagagggtccccgcacttactggaaccactgcgagcaataacgacttggcgtccctctttgagtgtcctgtctgttttgattatgtgctgcctcctatccttcaatgtcagtccggacacctcgtgtgttccaattgtcgtcctaaactgacctgctgccctacctgtcgcggcccgctgggaagcatcagaaacctggctatggaaaaagtggccaacagcgtgctgtttccatgtaaatacgcatcctcaggctgcgagatcactctccctcacactgaaaaagccgaccatgaggaactctgtgaatttcgcccatactcctgtccttgtccaggggccagctgcaaatggcagggatctctcgacgcagtgatgccacatctcatgcatcaacataagtcgatcactacccttcaaggcgaagatatcgtgttcctcgcaacggatatcaacctgccaggggccgtggattgggtgatgatgcaatcctgtttcggctttcatttcatgctcgtgcttgaaaagcaagaaaagtacgatggccaccagcagttttttgcaattgtccagctgatcggaaccagaaagcaagcggagaattttgcataccgacttgaacttaacggtcacagacgacgcctgacctgggaagcaacgcctcggtcgattcacgaaggcatcgcaaccgcaatcatgaactcggattgtctcgtgttcgatacgtcgattgctcaactgtttgccgaaaatggaaacttgggcataaacgtcaccatttcaatgtgt

SEQ ID NO: 33685 - DNA, 846 bp, synthetic construct
  misc_feature 1..846: note = Description of Artificial Sequence: Synthetic coding sequence
  source 1..846: mol_type = other DNA
atgtcgagacaaactgccaccgctctgcctactggaacctccaagtgcccaccatcacagcgggtgcctgctctgacggggactaccgcatcaaacaatgacctggccagcctgttcgaatgcccggtttgttttgattacgtcttgcctccaatccttcaatgtcaatcaggccatctggtctgttcgaattgtaggccaaagctcacctgctgccctacctgccgcggtcccctgggtagcattcggaacttggctatggagaaagtcgcaaactccgtccttttcccttgtaagtatgcctcgagcggatgcgaaattactctgccgcataccgagaaggcagatcacgaggaactgtgcgagtttcggccttactcctgtccctgtcccggagcctcgtgtaagtggcagggatcccttgacgccgtgatgccacacctgatgcaccaacataaaagcataaccacgcttcaaggtgaagatattgtctttctcgcgaccgatatcaatctccctggagctgtggactgggtgatgatgcaatcatgctttggtttccacttcatgttggtgctcgagaagcaggaaaagtacgacggtcatcaacagttcttcgctattgtgcaactcatcggtacccgcaagcaggcagaaaactttgcataccgactcgaactgaatggtcatcgtcgcaggcttacgtgggaagccacgcccaggtcgatccatgaaggcatagcaaccgcaatcatgaactcggactgtttggtgttcgatacttctattgctcagctttttgccgaaaacggcaatcttggcattaacgtgactatatccatgtgt

SEQ ID NO: 33686 - DNA, 846 bp, synthetic construct
  misc_feature 1..846: note = Description of Artificial Sequence: Synthetic coding sequence
  source 1..846: mol_type = other DNA
atgagcagacaaaccgcaactgccctcccgaccggaacttcgaagtgcccaccgtcacaacgcgtgccggccctcactggcactactgcaagcaataatgacctcgcatccctgttcgagtgtccggtgtgctttgactacgtcctgccgccaatcctgcagtgccagtcaggtcacctggtgtgctctaactgcaggccaaagctgacttgttgcccaacgtgtagaggccccctgggatcgatccggaacctggccatggagaaggttgccaacagcgtgctgtttccgtgtaaatacgccagctcgggatgcgaaatcactctcccgcacactgaaaaagcggatcatgaagagctctgcgagttccgtccttactcgtgcccctgtccgggcgcttcatgcaaatggcagggaagcctcgatgccgtgatgcctcatcttatgcatcaacacaaatcaatcactaccctccagggagaggatatcgtgtttctcgcaaccgacatcaatctgccgggtgccgtcgactgggtcatgatgcagtcttgcttcggattccatttcatgcttgtgctggaaaagcaagaaaagtacgacggacatcagcagtttttcgccatcgtgcaactgatcggaaccagaaaacaagccgagaacttcgcctatcgcctggaattgaatgggcatcggcgaagattgacctgggaagcaactccacgctccatccacgaaggaatcgccactgccatcatgaacagcgactgcctcgtctttgacacgtccatcgcccagctttttgctgagaacggaaacctgggcataaatgtgaccatctccatgtgc

SEQ ID NO: 33687 - DNA, 846 bp, synthetic construct
  misc_feature 1..846: note = Description of Artificial Sequence: Synthetic coding sequence
  source 1..846: mol_type = other DNA
atgtcccgtcaaaccgcgacagccctgcctactggaacgagtaagtgtcccccctcacaaagagttcctgcgctgacgggaacaactgcctccaataacgatctcgcatccctgtttgagtgtcctgtatgcttcgactatgtgctgcccccaattctccagtgtcagtcgggccatctcgtctgttcgaattgcagacctaaactgacatgttgtcctacctgccggggcccattgggttcaatccgtaatctcgcgatggagaaggttgcaaattcagtactgtttccatgcaagtatgcttcatccggctgcgagatcactctcccccatactgaaaaagcggaccatgaggaactgtgtgaattccggccatactcatgcccctgtccaggcgcctcctgtaagtggcaagggtcactggatgccgtgatgccccacttaatgcaccagcacaaatctatcacaactctccagggcgaagacatcgtctttctggccacagatataaatctacccggggcagttgattgggttatgatgcaatcctgttttggcttccattttatgctggtactggagaagcaagagaagtatgatggtcatcaacagttctttgccattgtgcaactaataggtaccaggaaacaagctgaaaacttcgcctatcgcctagagttgaacggacatcggcgcaggctcacttgggaagcaacacctcggagtattcacgagggcattgcaacagctatcatgaactccgactgcctggtgttcgacacgtcgattgcacagctgtttgccgagaacggaaacttaggcattaacgtgaccatttccatgtgt

SEQ ID NO: 33688 - DNA, 846 bp, synthetic construct
  misc_feature 1..846: note = Description of Artificial Sequence: Synthetic coding sequence
  source 1..846: mol_type = other DNA
atgagcagacagaccgccactgccctccccacaggcacatccaaatgcccccctagtcagcgggttccggccctgaccggaactaccgcgtcaaataacgacctggcttctttgtttgaatgtcctgtgtgctttgattacgtgttgccccctatcctgcagtgccagagtgggcatctagtttgctccaactgccgcccaaaactgacctgctgtcctacctgccgtgggccccttggatcgatacggaatcttgcgatggagaaagtggctaacagtgttttgtttccttgcaagtatgcctcaagtgggtgtgaaatcacactgccccacacggagaaagctgatcacgaggaactgtgtgagttccggccgtacagttgcccatgtccaggagccagctgcaagtggcagggaagtttggatgctgtgatgcctcatcttatgcatcaacataagtccattaccactctccagggggaggacatcgtgtttctggcaactgacattaatctccccggagccgtcgattgggtcatgatgcaaagctgttttggcttccacttcatgctcgttttggaaaaacaggagaagtatgatgggcaccaacagttctttgcgatagtgcagctgataggaactcgcaagcaagctgagaattttgcctacagattggaactgaatggacaccggcgtcgcctgacctgggaggcaaccccccggagcattcatgagggtatcgcaactgcaattatgaattcggactgtcttgtgttcgacacatcaatcgcacagctattcgctgagaacgggaatctaggaattaatgtgacaatcagtatgtgc

SEQ ID NO: 33689 - DNA, 846 bp, synthetic construct
  misc_feature 1..846: note = Description of Artificial Sequence: Synthetic coding sequence
  source 1..846: mol_type = other DNA
atgtcgcgccagacggcaaccgcactccccaccggtacgtccaagtgccccccttcgcagagggtcccggcgctgactggaactaccgcctcgaacaatgatctggcctcactcttcgaatgccctgtgtgcttcgactatgtgttgcctccgattctccagtgccagtccggacacctggtctgttcaaattgccggccgaagctcacttgctgcccaacctgccgcggccctctgggatcgatcagaaatctcgctatggaaaaagtggcgaactccgtgctcttcccgtgcaagtacgcctcctcgggttgcgaaatcaccctgccacatactgaaaaggcggaccacgaagaactttgcgaattccgcccttacagctgcccatgcccgggagcgtcgtgcaaatggcagggctcattggatgccgtgatgccgcacctgatgcaccaacataagtcgatcaccactctccagggcgaggacattgtgttcctggccactgatatcaacctccctggagccgtggattgggtgatgatgcagtcctgcttcggattccacttcatgttggttctggaaaaacaggagaaatacgatggacatcagcagttcttcgcgatcgtccaactgatcggcacccggaagcaagccgagaattttgcctaccggctcgagctcaatggccaccgcaggcgcctgacctgggaggctacgccacgctccattcacgaggggattgctactgccatcatgaatagcgattgcctggtgttcgatacttccattgcccaactgttcgcagaaaacggaaacctggggataaatgtgaccatctcgatgtgt

SEQ ID NO: 33690 - DNA, 846 bp, synthetic construct
  misc_feature 1..846: note = Description of Artificial Sequence: Synthetic coding sequence
  source 1..846: mol_type = other DNA
atgagcagacagactgccaccgctttaccgacgggtacgagtaagtgtccaccctcacagagagttcctgcgttaactggtactactgccagcaacaacgacttagcaagtttgttcgaatgcccagtttgcttcgattacgttctccctcctatcctccaatgtcagagtgggcatttggtctgttcgaactgccgccccaaattgacttgctgccctacctgtaggggtccactgggttcaattaggaatcttgcgatggaaaaagttgctaatagcgtcttgttcccttgcaaatatgcttcgtcgggttgcgagattacactgccgcataccgaaaaggctgatcacgaggagttgtgcgaattcaggccgtattcttgtccatgtcctggagcctcttgcaagtggcagggttctcttgatgctgtgatgcctcatttgatgcatcaacacaagagtattacaacccttcaaggagaagatattgttttccttgcaactgatattaatttgcccggcgctgtggattgggtcatgatgcaaagttgctttggctttcactttatgttagttctcgaaaaacaagagaagtatgatggccatcagcagttcttcgcaatagtccagttgattggtaccagaaagcaagctgagaactttgcttatcgacttgagttgaatggtcatagaaggcggttgacatgggaggcaacccctaggtctattcatgagggaatagctactgcgattatgaactccgattgtctcgttttcgatactagtattgcacaactattcgcggaaaacgggaacctggggattaatgtgaccatctcaatgtgc

SEQ ID NO: 33691 - DNA, 846 bp, synthetic construct
  misc_feature 1..846: note = Description of Artificial Sequence: Synthetic coding sequence
  source 1..846: mol_type = other DNA
atgtcacgtcaaaccgctaccgccctgccgactgggacctccaagtgcccaccatcacagcgcgttcctgcattgactggtacgaccgcgagtaacaatgacttggcgtcgctgttcgaatgcccggtgtgttttgattatgtcctgccgcctattctgcagtgccaatcgggtcatctggtgtgttccaattgtcgaccaaaattgacctgttgccccacctgccggggccctcttggttccattcgcaacctggcgatggagaaagtggcaaactccgtgctctttccatgcaagtacgcatcctcaggttgtgaaatcactcttcctcatactgaaaaggcagatcatgaggaactgtgtgagttccggccatactcgtgcccttgtcccggggcatcttgtaaatggcaggggagccttgatgctgtgatgccacatctcatgcatcaacacaagagcatcaccactttgcaaggcgaggacattgtctttcttgcaacggacataaaccttcctggcgcggtcgattgggtcatgatgcagtcatgcttcggatttcactttatgttggtgcttgaaaagcaggaaaagtacgacggacaccaacaattcttcgccatagtccaactcattggaactcgaaagcaggcagaaaactttgcataccgcctggaactgaacggtcaccgacggcgtctcacctgggaggccacccctaggtccattcatgaggggatagcgaccgcaatcatgaattccgattgcctggtgtttgatacctcaattgcacagctgtttgctgaaaatgggaacctgggtataaacgtgaccatttcgatgtgt

SEQ ID NO: 33692 - DNA, 846 bp, synthetic construct
  misc_feature 1..846: note = Description of Artificial Sequence: Synthetic coding sequence
  source 1..846: mol_type = other DNA
atgtccaggcaaaccgccacggctctccccacagggactagtaagtgcccccctagccagagggtccccgctctgactggaaccacagcatcaaacaatgatctggcgtccttgtttgaatgccccgtgtgctttgactacgtcctcccccccattctgcagtgtcaatcaggacaccttgtgtgttcaaactgtcggcctaagctgacttgctgtccgacctgtagaggccctctcggcagcattcggaatctggctatggaaaaagttgctaactcagtgctttttccgtgtaaatacgcctcttccggctgtgagatcaccctgcctcataccgagaaagccgaccacgaggagctgtgtgagttcagaccgtactcctgcccctgtcccggcgcctcctgtaagtggcaaggctctcttgacgcggtcatgccgcatctgatgcaccaacataagagtataacaacgctgcaaggcgaagatattgttttcctcgccaccgatatcaacttgccaggtgctgtggactgggttatgatgcagtcatgttttggattccatttcatgttggtgcttgaaaagcaggagaagtacgacggccaccaacagtttttcgccattgtccaactgatcggcacccggaagcaggctgaaaattttgcttaccgcctggagctcaatggtcataggcgcaggctgacttgggaggccacaccgcggtctatccacgagggtatagccacagcaatcatgaattctgactgtcttgtctttgacactagtatcgctcaactgttcgccgaaaatggtaacttgggtattaacgtgaccattagcatgtgc

SEQ ID NO: 33693 - DNA, 846 bp, synthetic construct
  misc_feature 1..846: note = Description of Artificial Sequence: Synthetic coding sequence
  source 1..846: mol_type = other DNA
atgtcgcggcagactgcgactgccctgccaaccggtacttctaagtgtccgccctcccagcgggtccctgctctgaccggaaccactgcctcgaacaacgaccttgcttcgctctttgagtgtcctgtgtgttttgattacgtgcttccaccaattctccagtgtcagtcggggcatcttgtgtgtagcaactgtcgccccaagttgacttgctgtcctacctgccgcggtcctcttggatcgattcggaacctcgcaatggagaaggtggcaaattccgtcctgtttccgtgcaagtatgcaagctcgggatgtgagattaccctccctcataccgaaaaagcggatcatgaagagctgtgcgaatttagaccttacagctgtccttgtccaggagcctcgtgtaaatggcaaggttcacttgatgccgttatgccccacttgatgcaccaacataaatcgatcaccaccctccagggcgaggatatcgtgttcctggctaccgatatcaacctgccaggcgcagtggactgggtgatgatgcaatcatgcttcggattccatttcatgctcgtcctggagaaacaagaaaagtacgatggtcatcaacaattctttgcaattgtgcagctcataggaacgcgcaagcaggcagagaactttgcgtatagattggaattgaatggacatagaaggcggctgacttgggaagcaactcctagaagcattcatgagggcatcgccacggcgattatgaactcagattgtctcgtgttcgatacctccattgctcagctgttcgcggaaaatggcaatcttggaattaacgtgaccatctccatgtgc

SEQ ID NO: 33694 - DNA, 846 bp, synthetic construct; identical to SEQ ID NO: 33638
  misc_feature 1..846: note = Description of Artificial Sequence: Synthetic coding sequence
  source 1..846: mol_type = other DNA

SEQ ID NO: 33695 - DNA, 846 bp, synthetic construct
  misc_feature 1..846: note = Description of Artificial Sequence: Synthetic coding sequence
  source 1..846: mol_type = other DNA
atgagtcgacaaacagctactgcacttccaacaggtacaagtaaatgtccaccatctcaaagagtaccagctttaacaggaactacagcatcaaataatgatcttgctagtttattcgaatgtccagtttgttttgattatgttcttcctcctattttacaatgtcaatctggtcatcttgtttgttccaactgtagaccaaaattaacatgttgtcctacatgtcgtggaccacttggttcaataagaaatttagctatggaaaaagttgctaattctgttctttttccttgtaaatatgcttctagtggatgtgaaattactcttccacatacagaaaaggctgaccatgaagaattatgtgaattcagaccatatagttgtccatgtccaggagctagttgtaaatggcaaggatctttggacgctgtaatgcctcacttaatgcatcaacacaaaagtataactacattacaaggagaagatattgtattcttagcaacagatataaacttaccaggtgctgtagattgggtaatgatgcaatcatgttttggttttcattttatgttagttttggaaaaacaagaaaaatatgatggtcatcaacaattctttgcaattgtacagttaattggaacacgtaagcaagcagaaaattttgcatacagattagaattaaatggacacagaagaagattaacatgggaagcaacacctagatcaattcatgaaggaatagcaacagctattatgaatagtgattgccttgtttttgatacatcaattgctcaattatttgctgaaaatggtaatttaggaattaatgttacaatttcaatgtgt

SEQ ID NO: 33696 - DNA, 846 bp, synthetic construct
  misc_feature 1..846: note = Description of Artificial Sequence: Synthetic coding sequence
  source 1..846: mol_type = other DNA
atgagccgccaaaccgcaaccgcactccctaccggaaccagcaaatgcccaccaagccaacgggtgccagccctgaccggcacgaccgcatccaacaatgatctcgcctcgctctttgaatgccccgtctgttttgattacgtgctgccacctattcttcagtgtcagagcggtcatctggtgtgttcaaactgccggcccaagctgacctgctgtcccacctgccgcggtcctctgggatcaatacggaatcttgccatggagaaggtggcgaattctgtgctctttccctgtaagtacgcaagctccggatgtgagattactctgccccacacggagaaggctgaccacgaggaactttgtgaattcagaccgtactcctgcccctgtccgggagcttcatgtaagtggcaggggtcccttgatgccgtgatgccacaccttatgcaccagcataagtcgattactacccttcagggtgaggacattgttttcctcgctactgatatcaatctcccaggcgccgtggattgggtgatgatgcagtcctgttttggatttcatttcatgctggtgctggaaaagcaagagaaatatgacggacatcaacagttttttgcgatcgtccagctcataggcaccaggaagcaggcagagaactttgcttacagactcgagttgaatggacataggagacggctgacttgggaagcgacgcctcgatctatccacgagggcattgccaccgctatcatgaactcggattgtcttgtctttgataccagcatagcacagctgttcgcagaaaatgggaaccttggaatcaatgtgaccatttcaatgtgt

SEQ ID NO: 33697 - DNA, 846 bp, synthetic construct
  misc_feature 1..846: note = Description of Artificial Sequence: Synthetic coding sequence
  source 1..846: mol_type = other DNA
atgagtaggcagactgcgaccgctcttcctaccggtacttccaaatgccctccgagccaacgcgtccctgcactcactgggactacggcatcgaacaacgatctcgcgagcctctttgaatgtccagtctgttttgattacgttctgccacccatcttgcaatgtcaatccggacacctggtctgttcgaattgcagaccaaagctgacctgttgtccaacctgcagaggacctttgggctccattcgcaacttggctatggagaaggtggctaacagcgtgctgttcccgtgcaagtacgcctcgtctggatgtgaaatcacgctccctcataccgaaaaggccgaccacgaggaactgtgtgaatttagaccgtatagctgtccctgtccaggggcatcatgcaaatggcagggttcccttgatgccgtgatgccccatctcatgcatcaacacaagagtattactacgctccaaggtgaggacattgttttcctggcaaccgacatcaatctgcctggtgcagtggactgggtgatgatgcagtcgtgcttcggtttccatttcatgcttgttctcgaaaaacaggagaagtacgatggacaccagcaattctttgctatcgtccagcttataggaacgcggaagcaagccgagaattttgcgtaccgactggagctgaatggacatagaaggcggctgacttgggaggctaccccgagatcgattcatgaaggcattgcaaccgccattatgaactcggactgtcttgtctttgatacctcaatcgcccagctgttcgcggaaaacggcaaccttggaatcaatgtgactattagcatgtgt

SEQ ID NO: 33698 - DNA, 846 bp, synthetic construct
  misc_feature 1..846: note = Description of Artificial Sequence: Synthetic coding sequence
  source 1..846: mol_type = other DNA
atgtcacggcagactgcgaccgccttgccgacgggaacttcaaagtgcccgccgtcccagcgcgtccccgccctcaccgggactaccgcctccaacaatgacttggcctcgctctttgaatgtccagtgtgtttcgactacgtgcttcctcctatcctccagtgccaatccggtcatctggtgtgctcgaattgtcgcccgaagctcacttgctgccctacctgcagaggtccactgggatccatccgtaatttggctatggaaaaagtcgcaaactccgtgcttttcccatgtaagtacgcgtccagcggatgcgagatcactctcccacacacggagaaggcggaccacgaagagctctgcgaatttcggccttactcctgcccttgtccaggcgcttcttgcaagtggcaaggatcgctcgatgcggtgatgccgcacctgatgcaccaacacaagtcgattactaccctccagggagaagatattgttttcctggcaaccgatatcaacctgccgggggctgtggactgggtcatgatgcagtcctgtttcggattccacttcatgctcgtgctggagaagcaggaaaagtacgatggacaccaacagttctttgcaatcgtgcagctgatcggaacccgcaagcaggcagaaaacttcgcgtaccggctggagctgaatggccataggagacgcctgacctgggaggctaccccacgcagcatccacgaggggatcgccaccgcaatcatgaacagcgactgtcttgtgtttgataccagcatcgcacagctcttcgcggaaaatggaaacctgggaattaacgtgactatctcgatgtgc

SEQ ID NO: 33699 - DNA, 846 bp, synthetic construct
  misc_feature 1..846: note = Description of Artificial Sequence: Synthetic coding sequence
  source 1..846: mol_type = other DNA
atgagccggcaaactgctaccgctctccctaccggaacctccaagtgtccaccatcacagcgcgttcctgcactgaccggcaccaccgcctcgaacaatgatctggcatcactgtttgaatgtcctgtgtgcttcgactacgtgctgcctccgattctgcaatgccagtccggacatctggtgtgttctaattgcagaccaaaactgacgtgttgtccaacttgcagaggcccgctgggctcgatccgcaaccttgcgatggaaaaggtcgccaattccgtgctttttccttgtaagtacgcgtcgtccggatgtgaaattacccttcctcatactgaaaaggctgatcacgaagagctttgcgaatttcgtccttattcctgtccctgcccgggggcgtcgtgtaagtggcagggatccctcgacgcagtcatgcctcatctgatgcatcaacataaaagcatcacgacgctccaaggggaggacatcgtgttcctcgctaccgacattaatctgcccggagctgttgattgggttatgatgcaaagctgtttcggatttcacttcatgctcgtgcttgaaaaacaggagaagtacgatggacaccaacagttttttgcaattgtgcaactcattggaactaggaagcaggccgaaaacttcgcataccgattggagcttaacgggcataggagacgtcttacttgggaggcaactccacggagcattcatgaaggaatagccaccgcaattatgaactccgattgtctggtgtttgatacctcaatcgcccagcttttcgctgaaaatggcaacctgggtattaacgtgactattagcatgtgt

SEQ ID NO: 33700 - DNA, 846 bp, synthetic construct
  misc_feature 1..846: note = Description of Artificial Sequence: Synthetic coding sequence
  source 1..846: mol_type = other DNA
atgtctcggcaaacagctaccgccctgcctaccggtacaagcaaatgcccgccgagtcagcgggtaccagcgcttacaggcacaacagcaagcaacaacgaccttgcttccctgttcgagtgccctgtttgtttcgattatgtcctgcctccaattctgcagtgtcaatcaggccacctcgtttgttcgaactgcaggcctaaactgacctgctgccctacctgtagaggacccctgggaagtattcgcaatctagccatggagaaggtagccaacagtgtactgttcccttgcaagtatgcatccagcggctgcgagatcacactaccgcacactgagaaggcggaccacgaggaactgtgcgagtttagaccttactcctgcccatgccccggcgcgagttgtaaatggcagggttccctcgatgccgtcatgccccatctaatgcatcagcataaaagtattacaacattgcagggtgaagacatagtcttcttagcaaccgacatcaacctgccaggcgctgtcgactgggtaatgatgcagtcttgtttcgggttccattttatgctggtgctagaaaagcaggagaaatatgatgggcatcagcagttctttgcgattgtacagctcattggaacccggaaacaggccgagaatttcgcataccgcctggagctgaacggacataggcgtcggctgacatgggaggcgacccctagatccatccatgaggggatcgctacagctatcatgaacagcgactgtcttgtctttgacacgagcatagctcagcttttcgccgaaaacggaaatttgggcattaacgtcacaatctctatgtgc

SEQ ID NO: 33701 - DNA, 846 bp, synthetic construct
  misc_feature 1..846: note = Description of Artificial Sequence: Synthetic coding sequence
  source 1..846: mol_type = other DNA
atgagccggcagaccgccactgccctgccaaccggaacaagcaagtgtcctccatcccagagagtgcctgctctgaccggaacaactgcaagcaataatgaccttgcatcactcttcgaatgccctgtgtgctttgactatgtgctgcctcccatcctgcagtgccagtccggccatcttgtatgttcaaattgcaggccgaagctgacttgttgtcctacgtgtcgcggacccctcggaagcattaggaacctagcaatggaaaaggtcgctaatagcgttctttttccgtgtaagtacgctagctccggttgtgaaataactctgccgcacaccgagaaagctgatcacgaggagctatgcgaattcaggccctactcttgcccttgtcctggagcctcatgtaagtggcagggctccttggacgctgtgatgccccaccttatgcaccaacacaagagcatcaccactctgcagggcgaagatatagttttcctcgccaccgacatcaacctccccggtgctgtggactgggtaatgatgcagtcttgcttcggcttccatttcatgctggtcctagagaaacaagaaaaatacgacggacatcagcagtttttcgccattgttcagctcataggaacgcgcaagcaagctgaaaactttgcttataggctcgaattgaatggacatcgcagacgcctcacttgggaagctacaccaaggagtattcacgaaggtattgctaccgccataatgaactccgattgtctggtattcgacacaagcattgcccagttatttgccgagaacggaaatttaggcattaacgtgaccatctccatgtgt

SEQ ID NO: 33702 - DNA, 846 bp, synthetic construct
  misc_feature 1..846: note = Description of Artificial Sequence: Synthetic coding sequence
  source 1..846: mol_type = other DNA
atgagccggcagactgccacagcgctacccacggggaccagcaaatgcccacccagtcagcgcgtgccagctcttacagggacaacagctagcaataatgaccttgcttccttatttgagtgccctgtgtgtttcgactacgtgctgccacctatactgcagtgtcagagtggccaccttgtctgcagtaattgcaggcctaagctgacttgttgccctacctgccgcggacccctcggttccatacggaatctcgcaatggagaaagtcgctaactctgttctctttccctgtaagtatgcttcctccggctgtgaaataactctgccccacacagaaaaggccgaccatgaagaactctgcgaattccgcccctactcctgcccatgtcctggggcctcatgcaaatggcaagggtcactggacgctgtcatgccccacctgatgcaccagcataagagtatcaccacacttcagggagaggatatagtgtttttggccacggacattaatctgcccggcgctgtcgattgggtaatgatgcagagctgcttcggctttcactttatgctcgtccttgagaagcaggagaaatacgatggacaccagcagttttttgctattgtccagctcatcggcacgcgtaagcaggcagagaactttgcctaccgcttggaactaaacgggcaccggcgaagattaacctgggaggccacccccagatctattcacgaaggaatcgctactgccatcatgaactctgactgtttggtatttgatacatcgatcgcgcaactgtttgcggaaaatggcaacctcgggatcaatgttactattagcatgtgt

SEQ ID NO: 33703 - DNA, 846 bp, synthetic construct
  misc_feature 1..846: note = Description of Artificial Sequence: Synthetic coding sequence
  source 1..846: mol_type = other DNA
atgagccgtcagaccgctaccgcattgccaaccgggacttcgaaatgcccaccatcccaacgcgttcctgctctcaccggaaccacggcatccaacaatgatctggcctcgctgtttgaatgtccggtctgttttgactacgtgctcccgcctattttgcaatgccagtccggacatctcgtctgtagcaattgcaggccgaagttgacctgctgccccacctgcaggggtccccttgggtcaattcggaacctggccatggaaaaagtcgcaaacagcgtgcttttcccttgcaagtacgcctcgtccggatgtgagatcaccctgcctcataccgaaaaggcagatcatgaggagctgtgcgaatttcgcccctacagctgcccatgtcccggtgcctcgtgtaaatggcagggatctctcgacgcggtcatgccccatctgatgcatcaacacaaatccattaccactctgcagggagaagatattgtgtttctggccactgacatcaacctgcccggtgcagtcgactgggtgatgatgcaatcgtgcttcgggttccactttatgctggtgctggaaaagcaggagaaatacgatgggcatcagcagtttttcgcaatcgtgcaactcatcggaacccgaaagcaggccgaaaacttcgcctacaggttggaacttaatggacatagacggcggcttacctgggaggcaacgccacgctcaattcacgaggggatagccactgcaattatgaactccgattgtcttgtctttgatacttcaattgcgcagctcttcgcagagaacgggaaccttggtattaacgtgactatttccatgtgt

SEQ ID NO: 33704 - DNA, 846 bp, synthetic construct
  misc_feature 1..846: note = Description of Artificial Sequence: Synthetic coding sequence
  source 1..846: mol_type = other DNA
atgagtcgtcagacggcaacagctctgcccacgggaacatctaagtgtccgcctagccagcgggttccggcacttactggcacgactgcaagcaataatgatcttgcctcactgttcgaatgtccagtctgctttgactatgtattgccaccgattttgcagtgtcagagcggccatttggtttgttcaaactgtcgtccaaaacttacatgctgtccaacgtgccgcggaccgctgggctctatccgcaatcttgcaatggagaaagttgccaatagcgtcttatttccttgcaaatacgccagctctggatgcgaaattaccttgccgcatacggaaaaagccgaccatgaagagttatgtgaatttcgcccatatagttgtccatgtcctggtgcgagctgtaaatggcaaggatctctcgatgctgtcatgccccatttgatgcatcagcacaaaagcattacaacactgcagggagaagatattgtattccttgcgacagacattaatttgccgggagctgttgactgggtcatgatgcaatcatgttttggcttccattttatgttggtcttggaaaagcaggaaaaatatgatgggcaccagcagtttttcgccattgttcaattgattggtactcggaaacaagccgaaaattttgcataccgtctggaactcaatgggcatcggaggcgtttaacgtgggaggccacgccccgctccatccacgaaggtattgcgacagcaattatgaactctgactgtcttgtttttgatacgagtattgcacagctttttgcggaaaatggaaacttaggaattaatgtcacaataagtatgtgc

SEQ ID NO: 33705 - DNA, 846 bp, synthetic construct
  misc_feature 1..846: note = Description of Artificial Sequence: Synthetic coding sequence
  source 1..846: mol_type = other DNA
atgtcccgccagaccgcaactgctctccctaccgggacctccaagtgccccccctcccagcgtgttcccgctctcaccggtacgacggctagcaataacgacctggcatccctgttcgagtgccccgtttgcttcgattatgtgctgccacccattcttcagtgccagtcgggtcatctggtttgttccaactgccggcccaagctcacttgttgtccgacatgccgaggccccttgggatctattaggaatcttgccatggagaaggtggctaactccgttttgttcccctgtaagtacgccagcagcggctgcgagatcactttgcctcacacggagaaggccgaccacgaggagctctgcgagttccgcccgtactcttgcccgtgccccggcgcttcgtgtaagtggcaaggctctttggacgccgtcatgccacacctcatgcaccaacacaaatctatcacgacgctgcagggcgaggacatcgtgttccttgccaccgatatcaacctgccgggtgccgtcgactgggtcatgatgcagagttgcttcgggttccatttcatgctcgtcctcgagaagcaggaaaaatatgacggccaccagcaattcttcgcaattgtccaactgatcggtacacggaagcaagcggagaacttcgcctaccgcctggaattgaacggtcataggcgtcgccttacgtgggaggccacgccccgcagcatccacgagggtatcgccaccgccatcatgaatagcgattgcctcgtcttcgacacgagtatcgctcagcttttcgccgagaacggaaatttgggcattaacgttaccatctccatgtgt

SEQ ID NO: 33706 - DNA, 846 bp, synthetic construct
  misc_feature 1..846: note = Description of Artificial Sequence: Synthetic coding sequence
  source 1..846: mol_type = other DNA
atgtcccggcagaccgccaccgctctgccgacgggaactagcaaatgcccgccgtctcaaagggtaccagccctcaccgggaccactgctagcaacaatgatctcgcctcgctctttgagtgcccagtgtgtttcgactacgtcctgccgcctattctccagtgccaaagcggtcaccttgtgtgctcgaattgccggccgaagctgacctgttgcccgacttgcaggggccctttgggatcgattcggaacctcgcgatggagaaggtcgcgaacagcgtgctgttcccctgcaagtacgcatcatccggctgcgaaatcactttgccacataccgagaaagctgaccacgaagagctgtgcgaattccgtccatacagctgcccatgtcctggagctagctgcaagtggcagggtagcctggacgcagttatgccgcatctgatgcaccagcataagtcgatcaccactctccagggagaggatatcgtgtttctggcaaccgacatcaacctcccaggggcagtcgactgggtgatgatgcaatcctgcttcggattccactttatgctcgtgctggaaaagcaagaaaagtacgatggacatcaacagtttttcgcgattgtgcagcttatcggaacccggaaacaggccgaaaactttgcctacagattggaattgaacggacataggcgtcgactgacctgggaggcgactccgagatcgatccacgaaggcatcgccactgcaataatgaatagtgactgtctggtgttcgataccagcatcgcccagttgttcgccgagaatgggaacctcggtatcaatgtcaccatctccatgtgt

SEQ ID NO: 33707 - DNA, 846 bp, synthetic construct
  misc_feature 1..846: note = Description of Artificial Sequence: Synthetic coding sequence
  source 1..846: mol_type = other DNA
atgagcagacaaacggccaccgctttgccaactgggacatcaaaatgcccgccttcccagagagtgccagccctgaccggtactacagccagcaacaacgatcttgccagtctgtttgaatgtcctgtgtgcttcgactatgtgctcccaccaatcctgcagtgccaatcgggccatctagtttgtagcaactgcagaccaaaactgacttgctgccctacgtgcagaggccctctcgggagcataaggaacctggctatggaaaaagttgctaatagtgtgctgttcccgtgtaagtacgccagctcaggatgcgagataaccctcccacacaccgaaaaagccgaccacgaggagctctgcgaattccggccctactcttgcccttgcccgggagcctcttgcaaatggcaggggtcattagatgcggttatgccccacctcatgcatcagcataagtccattactactctgcaaggcgaagacattgtgttcctcgctacagatataaacctgccgggtgcggtcgattgggtaatgatgcagagctgcttcgggttccatttcatgctcgtgctcgaaaagcaagaaaagtatgacggccatcagcagtttttcgctattgtgcagcttattggaacccgcaagcaggcagagaactttgcttacagattggagctcaatggccatcgcagacgattgacctgggaggccaccccacgttctatccacgagggtatcgccacagccatcatgaactccgattgcctggtgtttgatacttctatcgctcagctgtttgccgagaatggaaatctggggatcaacgtgactatttctatgtgt

SEQ ID NO: 33708 - DNA, 846 bp, synthetic construct
  misc_feature 1..846: note = Description of Artificial Sequence: Synthetic coding sequence
  source 1..846: mol_type = other DNA
atgtccagacagactgcgaccgccctgccgactggaacctcaaagtgcccaccaagccaacgcgtgcccgccctcaccggaaccaccgctagcaacaacgacttggcctccctttttgagtgccctgtgtgcttcgactacgtgctgccaccgatcctccagtgtcagagcggacacctggtgtgctcgaactgccggcctaaattgacttgctgcccgacttgccgggggccactcggcagcatcagaaatctggcaatggaaaaggtcgcgaattcggtgctgtttccgtgcaagtacgcgtctagtgggtgcgagattaccctgccccataccgaaaaggccgatcatgaagaactgtgtgagttcaggccgtactcctgtccatgtccgggagcctcgtgcaagtggcagggatcattggatgccgtcatgccgcaccttatgcaccaacacaaatcaatcacgactctgcagggcgaggatattgtgttcctggccaccgacatcaatcttccgggcgcggtcgactgggtcatgatgcagtcatgctttggattccacttcatgctcgtgctcgagaagcaagaaaagtatgacggacatcagcagttcttcgctatcgtgcagctcatcggtacccgaaaacaagccgaaaacttcgcgtaccgcctggagctgaatgggcatcgccgccggctcacttgggaggcaactcctagatcgatccacgaaggaatcgcaaccgccatcatgaactccgattgtctggtgtttgacacgtccattgcacaactgttcgctgaaaacggcaacctgggtatcaacgttactatctcgatgtgc

SEQ ID NO: 33709 - DNA, 1395 bp, synthetic construct
  misc_feature 1..1395: note = Description of Artificial Sequence: Synthetic coding sequence
  source 1..1395: mol_type = other DNA
atgggaggagccgttgtcgatgagggccccaccggagtgaaagcccctgacggcggttggggatgggctgttctgttcggctgctttgttatcaccggtttttcctatgccttccccaaagccgtttctgtcttctttaaagaactgattcaagaatttgggattggatatagcgataccgcctggatcagtagtatcctcctggctatgctgtacggaacaggtcctctttgttctgtgtgcgtgaataggtttggatgccggcccgtcatgctagtgggtggcttgtttgctagtctggggatggtggcagcgagtttctgcaggtctatcatacaggtttacctcaccaccggggtgataaccggcctgggcctcgccctgaatttccagcctagtctcataatgctgaataggtacttttccaaaaggcggcccatggctaacggtcttgctgccgccggctctccggtattcctttgtgcgctgagccctctcggacagttgctccaggaccgatatggatggaggggcggtttcttgattctgggcggcttgctcctcaattgctgtgtttgcgccgccttaatgaggccccttgtggtcaccgctcagcctgggtccgggccgcccagaccttcacgtcgactgcttgatctgtctgtgttccgcgataggggctttgtgctttatgcagtcgctgcatccgtgatggtgctgggactttttgtgccgccagtttttgtcgtttcatacgcaaaggatttgggcgtgcctgatacaaaggcagcctttctcctgaccatactgggttttattgacatattcgccaggccagcagccggctttgttgcaggcttgggaaaggtcaggccttacagtgtgtatttgtttagcttctcaatgttcttcaatgggctagccgatttggccggctccacagctggagactacggggggctcgtggtcttttgcatttttttcggaatctcttacggcatggtgggggctttgcagtttgaggtcctcatggctattgtgggcacccacaaattctcctcagcaatagggctggtgctgctaatggaggcagtcgcagtgctagttggcccaccctctgggggcaagcttctggacgcaactcacgtttacatgtatgtgttcatccttgcaggtgcagaagtgctcaccagcagcctgattttgctgctcgggaattttttctgtattaggaagaagcctaaagaaccccagccggaggtggccgctgccgaggaagagaagctgcacaagcctcctgcggacagtggggtggatctgcgagaagtcgaacacttcttaaaggctgagcctgagaagaacggcgaagtggtgcatacgccagagactagcgtt

SEQ ID NO: 33710 - DNA, 1395 bp, synthetic construct
  misc_feature 1..1395: note = Description of Artificial Sequence: Synthetic coding sequence
  source 1..1395: mol_type = other DNA
atgggcggtgcagtggtggatgagggtccaaccggagtgaaagcacccgacggaggctggggatgggcggttcttttcggatgctttgttattaccggtttcagctatgccttccccaaagcagtcagcgtgttctttaaggaactcattcaggaattcggaatcggttacagcgataccgcatggatttcatccatactcctggcgatgctctacggaacggggccactttgttcagtgtgtgtgaacagatttggctgcagacctgtgatgctggtcggaggccttttcgcatccctgggaatggtggcggcctcgttctgtcgatccatcatccaggtctacctgactaccggagtgattaccgggctgggccttgcacttaacttccagccttcgctcatcatgcttaaccgatacttcagcaagcgacggccaatggccaacggactggcagccgccggatcgcctgtttttctttgtgccctgtcgcccttgggacaactgttgcaagatagatacggatggagaggaggctttcttattcttggtggcctgcttctgaactgttgtgtctgtgcagcacttatgcggcctcttgtcgtgaccgctcaaccaggatctggaccacctcgtccatcccgccgcttgctcgacctgtcggtattcagagatagaggttttgtgctgtacgcggtggccgcttcggtgatggtgcttggtctttttgtgcctcctgtgtttgtagtgtcgtacgcaaaagatctcggggttcctgacactaaggcagcgtttctgctgaccatccttgggtttatcgacatatttgcaagaccagcagccggttttgtggcaggtcttgggaaggtgcgtccttactcggtgtacttgttttcgttttcaatgttcttcaacgggctggccgatcttgcaggctcaactgccggtgattacggcgggctggtcgtgttttgcatcttttttggtatttcgtacgggatggtgggtgcacttcagttcgaagtgctgatggcaattgtcggcacccataagttttccagtgctattggacttgtccttctgatggaagccgtcgcagtgcttgtcggacccccgtcagggggcaaacttctggatgcaactcatgtgtacatgtacgtgttcatccttgcaggagccgaggtcctgacctcgtcgcttatactgctgcttggaaacttcttttgcattcgaaagaagcctaaggagcctcaaccagaggtcgcagccgctgaggaagaaaagttgcataaaccccctgcagattcgggagtggacctcagagaagtcgaacactttttgaaggccgagcctgaaaagaacggagaagtcgtgcacacccctgaaacttcggtg

SEQ ID NO: 33711 - DNA, 1395 bp, synthetic construct
  misc_feature 1..1395: note = Description of Artificial Sequence: Synthetic coding sequence
  source 1..1395: mol_type = other DNA
atgggtggggccgtggtagatgaaggacctaccggggtgaaggccccggatggtgggtggggatgggcagtgctgtttggttgtttcgtgatcaccggcttttcctatgcctttcccaaggcagtgagcgtgttcttcaaggaacttatacaagaattcggaatcggctactccgacactgcctggatcagctcgatccttctggccatgctgtacggaaccggacctctttgctcggtatgtgtgaaccgatttggctgccgtcctgttatgctcgtggggggcctgttcgcctcccttggtatggtcgcggcctcgttttgtaggtctattatccaagtctacttgactacgggcgtgattactggcctcggtcttgctctgaattttcagccaagccttatcatgctcaacagatacttcagcaagagacgaccaatggctaatggacttgcagcagcaggttcgccagtgttcttgtgtgctctctcccccctgggtcaactgcttcaggacagatacggatggcggggtggctttctgatactgggagggcttcttcttaactgttgcgtctgcgcagcactgatgcgacctcttgtcgtgactgcacaacctggtagcggcccacctagaccttcgcgcagactgctggatttgtcggtgttccgcgatagaggatttgtgctctacgcagtcgccgcatccgttatggtgcttggactgtttgtccctccagtctttgtggtgtcgtatgcgaaggaccttggcgttcccgacacgaaagccgcatttctcctgactattttgggttttatcgacattttcgcacggccagcggctggttttgtggcaggactcggcaaggtccggccgtactcggtctacttgttcagctttagcatgttcttcaatggcctcgcggatctggcgggatccaccgcgggagattacggaggtttggttgtattctgtatcttctttggtatttcatacggaatggtgggagcgctgcaatttgaggtgcttatggcgattgtgggcacccacaaattctcaagcgccattggtcttgtgctcttgatggaagctgtggcggtccttgtcgggcctccatccggaggaaaacttttggatgcaactcatgtgtacatgtatgtgtttattcttgcaggtgccgaggtcctgacgtcaagtctgattctcctccttgggaacttcttttgtatccggaagaagccaaaagaaccccagcccgaggtagcagctgccgaagaagagaaacttcacaagccgccagctgactctggtgtggatctgagggaagtggagcatttcctcaaggcagaacctgaaaagaacggtgaagtcgtgcatacccctgagacttcagtg

SEQ ID NO: 33712 - DNA, 1395 bp, synthetic construct
  misc_feature 1..1395: note = Description of Artificial Sequence: Synthetic coding sequence
  source 1..1395: mol_type = other DNA
atggggggggctgtcgtagatgagggacctacaggggttaaagcccctgatggagggtgggggtgggcagttcttttcgggtgttttgttataacagggttttcttatgcatttcccaaggcagtaagtgttttcttcaaagaactgatccaggaatttgggatagggtatagtgatactgcatggatttcatccatcctgcttgccatgctctatgggactggaccactgtgttcagtgtgcgtgaatcgtttcgggtgtcgacccgttatgctcgtggggggactcttcgccagtctcggaatggtagccgcctccttttgcaggtccatcatccaggtgtatctgacaacaggagtaatcacagggcttggattggctctaaacttccagccttccttaatcatgcttaatcgatatttttctaaacggcgacccatggctaatggactcgctgctgccggaagtcccgtcttcctctgtgccttgtccccccttgggcagctgctccaggatcggtatggatggagagggggattcttgatcttgggggggcttctgctcaactgctgtgtctgtgctgcgttaatgaggcctcttgtcgtcacggctcagcctggatcagggcctcctagaccttcaaggagactgctcgacctgagtgtattccgggatcgcgggtttgtcctatacgctgtcgcagcttctgttatggttcttggattattcgtaccacctgtctttgttgtctcatacgcaaaggatctgggagtgcctgatactaaagccgctttcctattaactatattgggatttatagacatctttgcacgacccgccgccggattcgtggcaggattgggaaaagtaagaccttactctgtgtatttattctcattctctatgtttttcaatgggctcgctgatcttgccggatcaacagcaggggattatggggggcttgtcgtgttctgtattttcttcggaatctcctacgggatggttggggctctgcagttcgaggtcctcatggcaattgttggaacacacaaattttcatccgccatagggcttgtgctgctgatggaagctgtagccgtattagtggggcccccatctggggggaaactcttagatgccacacacgtctatatgtatgtgtttattctagccggggccgaagtgctcacatctagtctgatcctgctgctggggaacttcttttgtatccgaaagaaaccaaaagaaccacagcctgaagtagccgcggccgaagaggagaaattacataaaccacctgctgactccggagtcgatctccgggaagtggaacattttctgaaagccgaaccagagaaaaacggggaagtcgtgcacactccagaaacatctgta

SEQ ID NO: 33713 - DNA, 1395 bp, synthetic construct
  misc_feature 1..1395: note = Description of Artificial Sequence: Synthetic coding sequence
  source 1..1395: mol_type = other DNA
atgggcggggccgtggtcgacgagggccccactggggttaaggccccagatggtgggtggggttgggcagtcttatttggatgcttcgtaatcacgggattttcatatgccttcccaaaagcagtgagcgtgttctttaaggaactgatccaggaatttggtatcggctactctgacactgcatggataagctcaattttactcgccatgctgtacgggaccggccctctgtgttctgtatgcgtcaaccggttcgggtgccgacctgttatgctggttggtggactgttcgccagcctgggaatggtggcagcgtccttctgtagatccataattcaggtctacttgaccacaggcgtgataacgggactggggctcgccctgaatttccagccgagtcttatcatgcttaatcgttactttagtaagaggcgcccaatggcaaacggcctggctgccgccggctcccctgtgtttctttgcgcgctcagtcccctgggccagttgctgcaagaccggtatggatggcgcggaggcttcttgatcttgggcggacttctcctgaattgctgtgtctgtgccgccctgatgaggcccttagtggtgactgctcagcccgggagcgggccgccccggcccagtcgcaggttgctggatctatcagtatttagggatagaggctttgtcctgtatgctgtggccgcgagtgtgatggtcctggggttgttcgttccccccgtatttgtggtgagctatgccaaagacctgggcgtaccagataccaaggctgcattcctcttgactatcttaggattcatcgatatctttgctcggcctgctgctggatttgtggcaggcctgggcaaagtgaggccatactctgtctacttgttttcattttccatgttcttcaacggtttggcagacctggccgggagtacagctggtgactacggtggacttgtagtattctgtatttttttcgggattagctacggcatggtgggcgcgctacagtttgaggtgctgatggcgattgtgggaacccacaagttctcctctgccattggattggtgctgttgatggaggccgtggcagtcctggtggggccgccttccggcggcaagttgctcgatgctactcacgtgtacatgtacgtgtttatcctggccggtgccgaggtgttaacatcctccctaatacttttgctagggaatttcttctgcatacggaagaagccgaaagagccccagcccgaggtcgctgccgccgaggaagaaaaactccacaagcctccagctgacagcggagtcgatctaagggaggtcgagcactttctgaaggccgagcctgaaaaaaatggcgaggtggttcatacccccgagacatctgtg

SEQ ID NO: 33714 - DNA, 1395 bp, synthetic construct
  misc_feature 1..1395: note = Description of Artificial Sequence: Synthetic coding sequence
  source 1..1395: mol_type = other DNA
atgggtggggccgtggtggatgagggacctacgggtgtcaaagctcctgacggaggatgggggtgggccgtattgttcggttgctttgtgatcaccgggttttcgtatgcgtttccgaaagccgtcagcgtattttttaaggaactgatacaagagttcggtattggatactctgataccgcctggattagcagtattctgcttgcgatgctgtacggcactgggcccctttgctcggtatgcgtgaaccgattcggatgccgaccggtgatgttggtcggcggactgttcgcatctctgggaatggtcgctgcatctttctgtaggtccataatacaggtatacctgactaccggagtcatcaccggattaggcttagccctgaactttcagccatctctgattatgcttaaccgctatttctccaaacggcgtcccatggccaatgggctggctgctgcgggctccccggtttttctgtgcgcgttatcccctctcggtcagctgcttcaggacaggtatgggtggcgaggcgggttcctgatactggggggactcttgctgaattgttgtgtctgcgcagccttgatgcgacctcttgtggtaaccgcccagccggggagtgggccgccacggccctcccgcaggcttcttgatctgtccgtgtttagggacagagggttcgttctttatgccgtcgccgcctccgtgatggtcctgggcttatttgtaccgccggtgtttgtggtcagctacgctaaggatttgggagtccctgacacgaaagctgcctttctactgacaattttgggatttattgatatatttgcccggccggcagctggttttgtagccggcctgggaaaggtgaggccgtactccgtatatctgttctctttcagtatgttcttcaatggtctcgcagacttggcaggatcgactgccggggactacgggggcttggtagttttctgtatattcttcggcattagctacgggatggtgggtgccctacaatttgaggttctaatggcaattgttggtacccacaagttcagctctgcaatcgggctggtcctcctcatggaggctgtggctgtcctcgtggggcccccatctggaggcaagctgctggatgccacacacgtgtatatgtacgtgttcatcttggctggagctgaagtgctgacaagttcgctgattctgctgcttggaaatttcttctgcatcaggaagaaaccgaaggaaccccagcccgaagtcgcagctgcggaagaagaaaagctgcacaagcctcctgctgatagtggagttgatttgcgagaggtggaacatttccttaaggcagagcctgagaagaatggggaagttgtccacacccctgagacatcagtt

SEQ ID NO: 33715 - DNA, 1395 bp, synthetic construct
  misc_feature 1..1395: note = Description of Artificial Sequence: Synthetic coding sequence
  source 1..1395: mol_type = other DNA
atgggaggagcggtggtggacgaagggccgactggagtgaaggctcctgacggagggtggggatgggccgtgctttttggatgcttcgtgatcaccggcttctcatacgcattccccaaggccgtctcagtgttctttaaggaactgatccaagagttcgggattggctactctgatactgcctggatctcctccattctccttgccatgctgtacggaacggggccgctgtgtagcgtgtgcgtgaatagattcggttgccgcccagtgatgctggtgggaggtctgttcgcttcgctcggaatggtcgcggcgtcgttttgccgaagcattatccaagtctacctgaccacgggcgtgattacgggactcggactcgccttgaactttcagccatcgctcatcatgctgaaccggtacttctcgaagcgccgccctatggccaatggcttggcagctgcgggaagcccggttttcttgtgcgcgcttagcccactgggtcaactgctccaagacagatacggttggcgaggaggatttcttatcctcggaggactgctgctcaactgctgcgtctgcgcagcacttatgaggccgctcgtcgtcaccgcacagccgggttcgggaccaccgcgcccctccaggcggctgctggaccttagcgtctttcgggatcgaggtttcgtgctgtacgcggtggccgcgtctgtcatggtgctgggactcttcgtgccaccggtgttcgtggtgtcgtacgctaaggacctgggggtgcctgataccaaagcggccttcctgctgactatcctgggattcatcgacatctttgcgcgcccggccgcggggttcgtggcgggcctcggaaaggttaggccgtactccgtgtatttgttcagcttctccatgtttttcaatgggttggccgacctcgcggggtccaccgcaggcgactacggcgggctggtggtgttttgtatctttttcgggatctcgtacggaatggtgggggccttgcagtttgaggtgctcatggcaatcgtgggcacccacaaattctcgtcagctatcgggctcgtcctgctgatggaggccgtcgcggtcctcgtcggtccacctagcgggggaaaactgctggacgccacgcacgtctacatgtacgttttcatcctggccggagccgaggtgctgacttcttccctgattttgctgctgggaaatttcttctgtattaggaagaagccgaaagagccacagcctgaagtggctgccgccgaagaagagaagctccataagcctcccgcggactccggcgtcgatttgagagaggtggagcacttcctgaaagctgaacccgaaaagaatggagaagtggttcatactccagaaaccagcgtc

SEQ ID NO: 33716 - DNA, 1395 bp, synthetic construct
  misc_feature 1..1395: note = Description of Artificial Sequence: Synthetic coding sequence
  source 1..1395: mol_type = other DNA
atgggaggagcggtggtcgacgagggacctactggagtcaaggccccggatggaggctggggatgggcagtgctcttcggttgtttcgtgatcactggtttctcttacgccttcccaaaggctgtctccgtgttcttcaaagaactgattcaagagttcggcatcggatactcggacactgcgtggatttcgtccatcctgctcgccatgctgtatggaaccggcccgctttgctcagtctgcgtcaaccgcttcggatgtcgcccagtgatgctcgtgggtggcctgttcgcctcgctcgggatggtggcagcgtcgttctgtaggtcgatcattcaggtgtaccttactaccggggtgatcactggactcggacttgcgctcaatttccagccttctctgatcatgctgaacagatacttctccaagagacgcccaatggctaatggactggccgcggccggatcgcccgtcttcctttgtgcgctgtccccgctgggtcagctcctgcaagatcggtatggatggcgcggaggatttctcatcctgggtggtcttctcctgaactgttgtgtgtgtgcagccctgatgcggcccctcgtggtgaccgctcaacctggatccggaccgcccagacctagccgccgcctcctcgacctgtcggtcttccgagatcgggggttcgtcttgtacgccgtcgctgcgtcggtgatggttctgggcttgtttgtgccgccggtgtttgtcgtgagctacgctaaagatctgggagtgcctgacactaaggccgcattcctgctgactatccttggattcatcgacatcttcgcccggccggcagccggattcgtcgccgggctcggcaaagttcggccatactccgtgtacctgtttagcttttcgatgtttttcaacggcctcgccgacctggctggatcaacggccggtgactacggggggctggtggtgttctgcatctttttcggcatctcatacggtatggtgggagccctgcaattcgaggtgcttatggcgatcgtcggtacccataagttttcaagcgccatcgggctggtgctcctcatggaagctgtggcagtcctggtgggtcccccatccggaggaaaacttcttgatgcaacccacgtgtacatgtacgtgtttatcctggcgggagcggaggtcctcacctcctcccttattctgctcctgggcaatttcttttgcatcagaaaaaagccaaaggagccgcagccagaagtcgctgcggctgaagaagagaagctgcataagcctcccgcggattcgggggtggacctccgtgaggtcgaacacttcctcaaggcggaaccagaaaagaatggcgaagtggttcacaccccggaaacctccgtg

SEQ ID NO: 33717 - DNA, 1395 bp, synthetic construct
  misc_feature 1..1395: note = Description of Artificial Sequence: Synthetic coding sequence
  source 1..1395: mol_type = other DNA
atggggggagcagtggtggatgaggggcctacaggggttaaagcccccgacggagggtggggatgggccgtgcttttcggttgttttgttatcaccggctttagctacgctttcccaaaagcggttagcgtgttctttaaggaactcatacaggaatttgggattgggtattcagataccgcctggatatcctccatactgctggctatgctctacgggaccgggccactgtgttccgtgtgtgtcaaccggtttggctgtagacccgtcatgcttgttggtgggctgttcgcatcacttggaatggtggccgcgtctttctgccggagcattattcaggtgtatctcacgactggggttattacaggcctcggcttagccctcaatttccagcctagtttaatcatgctgaaccgttacttctcaaagagacgcccgatggccaacggactggctgctgccggtagccccgtcttcctgtgtgcattgagccctctgggccagctgctgcaggaccggtatggatggaggggcgggttccttatattgggcgggctccttctgaattgctgcgtatgcgccgctctcatgagaccactcgtggtaacagctcagcctggctccggcccaccccggccctcacggcggcttctggatctgagcgtgtttagagacagagggttcgtcctgtatgctgtggccgcttctgttatggtgttaggactgtttgtgccccccgtatttgtagtctcctacgccaaagatctaggggtgcctgacaccaaggccgctttcttactcacgattctagggtttatcgacatctttgcaagacctgccgctggattcgtggctggactgggcaaggtccgcccctatagcgtttatctcttcagtttctcaatgttttttaatggcctggccgatctggcaggatcaacggctggagactatgggggcctggtggtcttttgtatcttttttggtatttcttatgggatggttggcgcccttcagtttgaggttctgatggctatcgtgggcacccataagttctcaagcgcaatcggactcgtgctgctaatggaggccgtggccgtcttggtgggcccaccttcggggggcaaattgcttgatgccacgcacgtctacatgtatgtttttatacttgcgggagcggaggtgctcacaagctctttgatactcctactggggaactttttctgtatccgtaaaaaaccgaaagagccccagcctgaagtcgccgcagccgaggaggagaaactgcacaaaccgcctgcagatagcggcgtggacctgagggaagtggaacacttcttgaaggcagaaccagagaagaacggcgaggttgtgcacacaccggagacgtccgta

SEQ ID NO: 33718 - DNA, 1395 bp, synthetic construct
  misc_feature 1..1395: note = Description of Artificial Sequence: Synthetic coding sequence
  source 1..1395: mol_type = other DNA
atgggtggtgcggttgtagatgaaggtccgacgggtgttaaagcgccggatggtggttggggttgggcggtattatttggttgttttgtaataacgggtttttcgtatgcgtttccgaaagcggtttcggtattttttaaagaattaatacaagaatttggtataggttattcggatacggcgtggatatcgtcgatattactagcgatgttatatggtacgggtccgctatgttcggtatgtgtaaatcgttttggttgtcgtccggttatgttagtaggtggtttatttgcgtcgctaggtatggtagcggcgtcgttttgtcgttcgataatacaagtttatctaacgacgggtgttataacgggtctaggtttagcgctaaattttcaaccgtcgttaataatgttaaatcgttatttttcgaaacgtcgtccgatggcgaatggtctagcggcggcgggttcgccggtatttttatgtgcgctatcgccgctaggtcaattattacaagatcgttatggttggcgtggtggttttttaatactaggtggtttattattaaattgttgtgtatgtgcggcgctaatgcgtccgttagtagtaacggcgcaaccgggttcgggtccgccgcgtccgtcgcgacgtctactagatttatcggtttttcgagatcgtggttttgtattatatgcggtagcggcgtcggttatggtattaggtttatttgtaccgccggtttttgttgtttcgtatgcgaaagatttaggtgtaccggatacgaaagcggcgtttttactaacgatactaggttttatagatatatttgcgcgaccggcggcgggttttgttgcgggtctaggtaaagtacgtccgtattcggtttatctattttcgttttcgatgttttttaatggtttagcggatttagcgggttcgacggcgggtgattatggtggtctagtagttttttgtatattttttggtatatcgtatggtatggttggtgcgctacaatttgaagtactaatggcgatagtaggtacgcataaattttcgtcggcgataggtttagtattattaatggaagcggtagcggtactagtaggtccgccgtcgggtggtaaactactagatgcgacgcatgtatatatgtatgtttttatactagcgggtgcggaagtattaacgtcgtcgttaatactattattaggtaattttttttgtatacgaaaaaaaccgaaagaaccgcaaccggaagtagcggcggcggaagaagaaaaattacataaaccgccggcggattcgggtgtagatctacgagaagttgaacattttttaaaagcggaaccggaaaaaaatggtgaagtagtacatacgccggaaacgtcggta

SEQ ID NO: 33719 - DNA, 1395 bp, synthetic construct
  misc_feature 1..1395: note = Description of Artificial Sequence: Synthetic coding sequence
  source 1..1395: mol_type = other DNA
atggggggcgctgtggttgacgaaggaccaaccggcgtaaaagctccagacgggggctggggatgggcggtgctcttcggctgctttgtcattaccgggttctcttacgcctttcctaaagccgtctctgtcttcttcaaggaactgattcaggagttcggcattggctatagcgataccgcttggatctcttccatcctgctggcgatgctgtatggaactggacccctttgctcagtgtgcgttaatcgatttggatgtaggccggtaatgctggtcggaggactgttcgcatccctgggcatggtagcagcttccttctgtagatccatcatccaggtctacttaactactggagtcatcaccggcctggggctggctctgaattttcagcccagcctcattatgctaaaccgatactttagcaagcggcggcccatggctaatggactggctgccgcagggagcccggttttcttgtgtgccctctccccgctgggccaactgttgcaagatcggtatgggtggagaggcggatttttaatactcggagggctgctgctgaattgctgcgtgtgcgctgccttgatgcgacctctggtcgtaacggcacagccagggtctggtccacccagacccagtcggcggcttctagacctgagcgtattcagggacaggggatttgtgctgtatgcagtggctgctagcgtgatggtgcttggactctttgtgccccctgtgtttgttgttagttacgcaaaagatttgggcgttccagataccaaggctgcctttctgcttacaatcctgggcttcattgacattttcgctaggcctgccgctggattcgtagcgggccttggaaaggtacgaccatattcagtgtatcttttcagtttcagcatgtttttcaacgggctagccgatctggccggctctactgccggcgattacggcgggttggtggtcttctgcattttctttggcatttcctacgggatggtgggcgccctacagttcgaagtccttatggcgattgtgggaacccataagttttcctcagctatcggtttagtgcttctcatggaagctgtcgcggtgctcgtcggtcctccatccggtgggaagcttttagacgccactcacgtgtatatgtacgtcttcatcctggcaggggcggaagtgctcactagtagcctgatactactgctgggtaattttttttgtattaggaaaaagcccaaggaaccacagcctgaggtagccgcagccgaggaggagaaactccataaaccccctgcagactctggcgtggacctccgcgaagttgaacacttcctcaaagccgagccagaaaaaaacggtgaggtggttcacacccccgagacctccgtt

SEQ ID NO: 33720 - DNA, 1395 bp, synthetic construct
  misc_feature 1..1395: note = Description of Artificial Sequence: Synthetic coding sequence
  source 1..1395: mol_type = other DNA
atgggcggagcagtggttgacgagggaccaaccggcgtcaaggcgccggacgggggatggggatgggctgtgctgttcggatgctttgtcatcaccggtttttcatacgccttccccaaggcggtcagcgtgttcttcaaagaacttatccaagaatttggcatcggttactcggacactgcatggattagctcgatcttgctggctatgctgtacggcaccggaccactgtgctcggtgtgtgtcaaccgcttcggatgccggccggtcatgctggtcgggggactctttgcgtctttgggcatggtggccgcctcattctgcaggtcaatcatacaggtctacctgaccaccggtgtgatcactggactgggactggcactgaactttcagccgtccctgatcatgctcaataggtacttttccaagcgtagaccaatggcgaacggtctggccgccgcaggctccccggtctttctgtgtgcactgtcgccgctgggacagcttctgcaagatcggtatggttggagaggcgggttcctcattttgggcggactcctgcttaactgctgtgtctgtgctgccttgatgcgcccactggtggtgactgcgcagcctgggtcaggcccacctcgcccatccaggcggctgctggacctgtcggtgttccgcgatcgaggattcgtgctgtatgccgttgcagcctctgtgatggtgttgggattgttcgtgccaccggtctttgtggtttcgtacgccaaagatctgggagtcccagacactaaggcagcattcctcttgaccatcctgggcttcatcgacattttcgcgcgcccagcagcaggtttcgtggcgggtcttggaaaagtccggccctactccgtctacctgttcagcttttctatgttcttcaatggactggccgatctggcgggaagcaccgctggagattacggggggctggtggtgttctgtatcttctttggaatctcctatgggatggtgggtgccctgcaattcgaagtgctcatggccattgtgggcacccataagttttcatcggcgatcgggctcgtcctgctgatggaggccgtggctgtcctggtcggaccgcctagcggcggaaagctgctggatgccacccacgtgtacatgtatgtgttcatcctcgccggcgcagaggtgcttacttcctctctcattctgcttcttggtaacttcttctgcatcagaaagaagccgaaggagccccaaccggaagtcgccgctgccgaggaggagaaactgcacaagccgccggccgactccggagtggatcttagagaggtggagcactttctcaaggcggagccagagaaaaacggagaggtcgtccacaccccagaaacgagcgtg

SEQ ID NO: 33721 - DNA, 1395 bp, synthetic construct
  misc_feature 1..1395: note = Description of Artificial Sequence: Synthetic coding sequence
  source 1..1395: mol_type = other DNA
atgggtggagctgtcgtcgacgaaggtccaactggggtgaaagcaccagacggaggatgggggtgggcagtgctttttggatgtttcgtgatcactggtttttcatacgcgtttcctaaggcagtgtccgtgtttttcaaggaactcattcaggagtttggaattggatacagcgatactgcctggatctcgtcgattcttctcgccatgctttatggcaccggaccactttgttcggtgtgtgtgaaccgctttggctgtcgacctgtgatgctcgtgggtggactgtttgccagccttggaatggttgccgcctcgttttgtcggtccattattcaggtgtacctgactaccggggtgatcaccggcctgggactggctttgaactttcagccttcgctcattatgcttaaccgttactttagcaagcggcgccccatggcaaatggtctggctgcagccgggtcgccagtgtttctgtgtgcactctcacccctgggtcagctcctgcaagaccgctacggatggcgcgggggtttccttattctcggcggccttctgctgaactgttgtgtgtgcgcagcacttatgaggcctctggtcgtgactgcccaacctggatcgggccctccgcgcccttccaggagacttctggacctcagcgtgtttagagatcgcggtttcgtcctttacgcagtggcagcatcggtgatggtccttgggttgtttgtcccaccagtctttgtcgtgagctacgccaaggacctgggtgtgcctgatactaaggcagcatttctcctcactattctgggattcatcgacatttttgctaggccagcagccggatttgtagcaggactcggcaaagttcgtccatactccgtgtacctgttctcctttagcatgttcttcaatggccttgcggacctggccggctccacggcaggagactacggtggcctggttgtgttttgcatcttttttggaatatcatacggtatggtgggagccctgcaattcgaagtgctgatggcgattgtgggaactcacaagttttcctccgcaatcggtcttgtgctcctcatggaagcagtggccgtcctcgtagggcccccatcaggtggaaaacttctggacgcaacccatgtctacatgtacgtgttcatcctggcaggagcagaagtgcttacctcgtccctgattctcctcctcgggaatttcttttgtatccgaaagaagcctaaagaacctcaacctgaagtggcagccgccgaagaggagaaacttcacaaaccccctgcagattccggagtggaccttcgagaagtggaacatttccttaaggcagaaccggaaaagaacggagaagttgtgcataccccagagactagcgtg

SEQ ID NO: 33722 - DNA, 1395 bp, synthetic construct
  misc_feature 1..1395: note = Description of Artificial Sequence: Synthetic coding sequence
  source 1..1395: mol_type = other DNA
atggggggtgcagtggtggatgagggcccaacaggtgtgaaggctccagatggaggatgggggtgggccgtcctgtttggctgcttcgtgataaccggattttcatatgccttcccaaaagccgtgtccgttttctttaaagagctgattcaggagttcgggatcgggtattccgacacggcatggatctcctctatcctccttgcaatgctatacggaacgggccccctgtgctccgtctgcgttaataggtttggttgccggcctgtcatgttggtggggggactgttcgcatcacttgggatggtagcggcaagcttctgcaggtcaattatccaggtgtacctgaccaccggcgtgataacagggcttgggctagcacttaattttcagccaagtctgattatgctaaaccgctattttagcaaacgaagacctatggccaatggactggccgctgctggatctcctgtctttctgtgcgccctgagccctctggggcagctgctgcaggaccgttatggatggaggggcggtttcttgatattaggaggactgctgctgaattgttgtgtatgcgctgctctcatgagacctctggtcgtgactgcccaaccaggctctggtccgccaagaccctcgcgccgacttcttgatctgtccgtctttcgggatcgagggtttgtgctctacgctgtcgctgcctccgtaatggtactgggcctcttcgtccctcccgtgtttgtcgtttcttacgccaaggatctcggtgttccagacacaaaggcagctttcctgctgactatcttgggctttatcgacattttcgccagacctgccgctggcttcgtggcgggccttggtaaggtccggccttattctgtttatctattctcattctccatgtttttcaatggccttgccgaccttgccggatccacggcaggagattacggtggcttagtcgttttctgcatcttttttggcattagctatggtatggttggagcccttcagtttgaagttttgatggccatcgtgggaacccacaagttcagttccgccattggacttgtgctcctgatggaggccgtagccgtgctggttggaccccctagcggcggaaagctcctggacgctacccacgtctatatgtatgtattcattcttgccggagctgaagtgttgacctcatctttgatccttcttctgggcaatttcttctgcattaggaagaagccgaaggagcctcaacctgaggtggccgctgcagaggaagagaaattgcataaacccccagcagattctggggtggacctcagggaagtagagcattttctgaaggccgagcccgagaagaatggcgaagtcgttcatacccccgagacttcggtg

SEQ ID NO: 33723 - DNA, 1395 bp, synthetic construct
  misc_feature 1..1395: note = Description of Artificial Sequence: Synthetic coding sequence
  source 1..1395: mol_type = other DNA
atgggcggggctgtggtcgacgaaggaccaactggcgtgaaagctcctgacggaggatggggttgggccgtgctctttggctgctttgtcataaccgggtttagttacgctttccctaaagctgtcagcgtcttctttaaggagctgatccaggaattcggcatagggtactctgacactgcctggatatcttccatactgctcgctatgctctatgggaccggtccactctgctccgtgtgcgtgaaccgcttcggctgtaggccagttatgctagttggcggcctgttcgcctctttaggcatggtggctgcatctttttgccgatcaattattcaggtgtacttgacaaccggcgttataactggcctgggcctggccctgaatttccaaccaagtctaataatgttaaatcgctacttttccaagagaagacccatggctaacggactggctgccgccgggagccctgtttttttgtgtgccctaagcccactcgggcagctgctgcaggatcgctacggttggcgggggggtttcctgatccttggcggcctgctgctgaactgctgtgtgtgtgctgccttgatgcgccccctggttgtcaccgcccagccaggaagtgggcctccccgtccctccagaaggctgctcgacctgtctgtgttccgtgatcggggctttgttctgtacgccgtggctgctagcgtgatggtgctgggcttgttcgtgccccccgttttcgttgtgagctacgccaaagacctaggggttccagatacaaaggctgccttcttactgaccatcttaggctttattgacatattcgccaggcctgccgccggctttgtggcagggcttgggaaagtccgcccttacagcgtgtatttattttctttctccatgttcttcaatggcctagccgacctggctggatctactgcaggggattatggaggtctcgtggttttttgtatctttttcggcatatcttatggtatggtgggggccttgcagttcgaggtgcttatggcaatcgttggcacacacaaattcagctccgctatcggattggtgcttctgatggaggcagttgccgtgctggtggggccaccctccggcggcaagctgttagatgccacacacgtttacatgtacgtcttcattctcgccggagctgaggtgctgacatcttccctcatcctgttattggggaacttcttctgcataagaaagaagcctaaggagccccaaccagaagtggccgccgccgaggaggaaaagctccacaagccacctgcagatagtggggtggacctgcgcgaagttgaacacttcctgaaagccgaacccgaaaaaaacggcgaggtggtgcatactcccgagaccagcgtc

SEQ ID NO: 33724 - DNA, 1395 bp, synthetic construct
  misc_feature 1..1395: note = Description of Artificial Sequence: Synthetic coding sequence
  source 1..1395: mol_type = other DNA
atgggcggcgcagtggtcgatgagggtccgacgggtgtgaaggcccccgatggtggatggggctgggccgtgctgttcggctgcttcgtcatcactggattctcgtacgccttccccaaggccgtcagtgttttcttcaaagaactgatccaggaattcggtatcggctactccgacactgcctggatctcctccattctgttggccatgttgtacggtaccggtccattgtgtagtgtctgcgttaaccgcttcggctgccgaccggtgatgctcgtcggcggtcttttcgccagccttggcatggtggccgcctcattctgccgtagcattatacaggtgtacctcaccactggtgtcatcaccggtctgggtcttgctttgaacttccagccttcgttgatcatgttaaaccgctatttttcgaaacgccgccccatggcgaatgggctggcggctgcaggtagtcccgtcttcctttgcgctctgtcgcctcttggtcagctactccaggatcgctatggctggcgcggcgggttcctcattcttgggggtctcctgctgaactgctgcgtgtgcgccgctcttatgcgccccctcgttgtcacggcgcagcctggatccggccctccccgtccttctagacgccttttggacctgtcagtctttcgtgaccgtgggttcgtgctttacgccgtggcggcttccgttatggttctcggtctgttcgtaccgccggtgttcgtcgtttcgtatgccaaggacctcggtgtccccgacaccaaggccgccttcctgttgacaatcctcggtttcatcgatatttttgccaggcccgccgccgggttcgtcgctggcctgggcaaggtgcggccctactcggtctacctcttctccttctctatgttcttcaacggacttgcagatctggcaggcagcacggccggggattatggtgggctcgttgttttctgcatctttttcggcatttcttatggtatggtgggtgctctacagttcgaggtgcttatggccatcgtgggtacccacaagttcagcagtgccattggcttggtcctcttgatggaggctgtcgccgtgcttgtcggaccgccatccggaggaaagcttctcgatgcgacccacgtttatatgtacgtgttcattctggcaggtgcagaagtcttgacgagcagcttgatcctgctgctcggaaacttcttctgcatcaggaagaagcccaaggagccgcaacccgaggttgctgcagctgaggaagagaagctccataagccgcctgccgactccggcgtggacctgcgggaggttgagcatttcttgaaggccgagcccgagaagaacggagaggtcgttcatacaccagagacctcggtc

SEQ ID NO: 33725 - DNA, 1395 bp, synthetic construct
  misc_feature 1..1395: note = Description of Artificial Sequence: Synthetic coding sequence
  source 1..1395: mol_type = other DNA
atgggtggcgccgtggtggacgagggcccaacaggagtgaaggctccggatgggggctggggatgggccgtcctatttgggtgttttgtaattacaggcttctcgtatgccttcccaaaggcagtgagcgttttttttaaggaactgattcaggagttcggcattggctatagcgacactgcctggatctcttctatcctgttggccatgctatacggaactggccctttatgctccgtctgcgttaacaggttcggttgccgccccgtgatgcttgtgggtgggctgtttgcaagcctgggcatggtcgctgcaagcttttgtaggagcatcatccaggtttatctcaccacgggggtgataacaggtttaggactggccctgaatttccaaccctccttaatcatgttaaaccggtactttagcaagagaagaccaatggctaacgggctggccgcggctggctccccagtgttcctctgtgccctgagcccgctggggcaactcctgcaggacaggtacgggtggcgcggggggttcctcatactgggtggcctcctgctgaactgctgcgtctgcgctgcgctaatgagaccactcgtagtgacagcccagcctggatcaggccctcccagaccatccaggaggcttctggacctgtccgtttttagagacagaggctttgttttgtacgcggtcgcggcaagcgtgatggttctcggactcttcgtcccacctgtgttcgtggtctcctacgcaaaagaccttggcgtcccagacactaaggcagccttcttgttgactatactcggattcattgacatcttcgctcgaccagcagccggctttgtcgccggcttaggaaaggtgagaccatatagcgtgtacttgtttagcttttccatgttctttaatgggttagcggatttggcaggaagtactgctggcgactatgggggtctggtcgttttttgcatcttcttcggaattagttacgggatggtgggggccctccagttcgaggtgctcatggcaatagtcggtacccataagttctcaagcgcaatcggattggtcttactcatggaggccgtggcagtcttagtcggaccgcccagtgggggcaaattgcttgatgctactcatgtttacatgtacgtgttcatcctggccggagcagaagtcctcacctcgagcctaatccttctgcttggtaacttcttctgtatccggaaaaaacctaaggagccccaacccgaggtggccgccgctgaagaagagaaactacataagcctcccgccgatagcggagtcgatctcagagaagtggagcacttcctgaaggctgagcccgaaaaaaacggtgaagtagtccacaccccagagacatctgtg

SEQ ID NO: 33726 - DNA, 1395 bp, synthetic construct
  misc_feature 1..1395: note = Description of Artificial Sequence: Synthetic coding sequence
  source 1..1395: mol_type = other DNA
atgggaggggcagtggtggatgaaggacctaccggtgtcaaggcgcctgatggaggttggggatgggcagtgctgtttggatgttttgtgattactggatttagctacgccttccccaaggccgtgtcggtattcttcaaagaactgatacaggaatttggtattggatactcggataccgcatggatcagtagcattcttcttgcaatgctctacggaaccggtcccctttgttccgtgtgcgtaaaccgatttggctgtcgccccgtcatgcttgttgggggcttgttcgcatcactggggatggtcgctgcatctttctgtcgatcaattatccaggtctacttgactacgggagtcattaccgggctcggtctggcactcaattttcaaccttcgctgatcatgctcaacagatacttctccaagagacgcccaatggcaaatggccttgcggcggcaggatcccctgtctttctgtgcgccctgtcaccacttggacaactgttgcaagacaggtacggttggagaggtggatttcttatcctcggcgggctcttgctgaactgttgcgtgtgtgcagcactcatgcgtcctctcgttgtcactgcccaaccaggctcagggccacctcggccatcgagacgactccttgatctgtccgtgttccgtgaccggggttttgtgctctacgctgtggcagcatccgtgatggtgctgggtcttttcgtgcctcctgttttcgtggttagttacgccaaagatctgggtgtccctgatactaaggcggcatttctgctcactatcctgggctttatcgacattttcgcacggcccgctgcgggttttgtggccgggttgggtaaggtacgcccatacagcgtctatcttttttcctttagcatgttctttaacggtctggcagatcttgctggttccactgcaggagattacggcggcctggtggtgttttgcatattctttggcatttcgtatgggatggtcggagcactgcaatttgaagtcctcatggcgattgttggaacccacaagttctcgtcagccatcgggctggtgctgctgatggaagcagtggccgtgctggtgggaccgccgagcggaggaaagttgcttgatgccactcacgtgtacatgtacgtgttcattttggcaggagccgaagtccttacctcctcgctcattctgctgcttggtaacttcttttgtatccggaagaaacctaaagaaccacagcccgaggtcgccgcggcggaggaggagaagctccataaaccacccgcggactcgggcgtcgaccttagagaggtggaacattttcttaaggcagaaccagagaagaatggtgaagtggtgcatacccctgaaacgagtgtg

SEQ ID NO: 33727 - DNA, 1395 bp, synthetic construct
  misc_feature 1..1395: note = Description of Artificial Sequence: Synthetic coding sequence
  source 1..1395: mol_type = other DNA
atgggaggtgccgtggttgacgaaggtccaactggagtgaaagcaccggacggtggctggggatgggccgttctttttggatgtttcgttataaccggattcagttacgcttttccaaaggcagtatcggtgtttttcaaggaactgattcaagaattcggtattggttactccgacactgcatggatctcgagcatcctgttggcaatgctctacggcaccggccccctgtgtagcgtgtgcgtcaatcgatttggttgtcgaccagtgatgctcgttggcggacttttcgcgagccttggtatggtggcagcatccttttgcagaagcatcattcaggtctacctcactactggagtgattacgggactgggtcttgcactcaactttcaaccaagcctgatcatgcttaacaggtacttttcaaagcgacggccgatggcaaacggactcgctgcagccggatcccctgtgttcttgtgcgctctcagcccacttggccagcttcttcaagacagatacggttggcgcggagggtttctcattcttgggggactgctgcttaattgttgcgtctgcgctgcacttatgcggccactggtggtcaccgcccaacctggatcgggccctcctagaccatcgcggagactcctcgatctgtcagtctttagagatcgcgggtttgtcctttacgcggtcgccgcttcggtgatggtgctggggttgtttgtaccgccggtctttgtcgtatcctacgcaaaggatctcggggtgccagacacgaaggcagcctttcttctgactattctgggctttatcgatatctttgcacgccctgcagccggttttgtggcagggctgggtaaggtccggccttattcggtgtacctgtttagcttctcaatgttctttaatggactcgcagaccttgctggaagcactgccggggattacggtggccttgtggtgttttgcatattcttcggtatatcgtatggaatggtgggcgcgctccagtttgaggttttgatggcaattgtgggcacccacaagtttagctcagcaattggactcgtgctgcttatggaagcggtcgctgtcctggtgggtcctccatccggcggtaagctgctcgatgccacccatgtgtatatgtacgtctttattctggcgggtgctgaagtgctgacctcgtcgctgatcctgctcttgggtaactttttctgtattcgcaagaaacctaaagagccccaacctgaggtggcagcagctgaagaagagaagctgcacaaacctccagcagattccggggtggatctgcgtgaagtcgaacattttctgaaggcagagcctgagaaaaacggtgaagtggtgcatactcctgaaacgtccgtg

SEQ ID NO: 33728 - DNA, 1395 bp, synthetic construct
  misc_feature 1..1395: note = Description of Artificial Sequence: Synthetic coding sequence
  source 1..1395: mol_type = other DNA
atgggtggagcagtggtggacgagggacctaccggagtgaaagcccctgatggcggttggggctgggcagttctctttgggtgttttgtgatcaccgggttctcttacgcatttcccaaggcagtgtcggtctttttcaaggaactgattcaagaatttggaatcggctactcggatactgcgtggatctcgtcaatattgctcgcaatgttgtacggcaccggaccactgtgtagcgtctgtgtgaaccgctttggatgccgccctgttatgctggttgggggtcttttcgcctcgctgggcatggttgccgcgtctttttgcagatcgattatccaagtgtacctcaccaccggagtgatcaccggtttgggactggcactcaatttccagccatcgctcattatgctgaaccggtatttcagcaagagacgaccaatggcaaatggcttggccgcagctggcagccctgtttttctttgtgccctgtcgccattgggacagctgctgcaagatcgttacggatggagaggaggcttcctcatcctgggcggcttgctgcttaattgctgcgtgtgcgctgcacttatgaggccacttgtggtcactgcacaaccaggttccggaccaccccgcccttcccgcagacttctggacctgagcgtctttagggatcggggatttgtcctgtacgcagtggcggccagcgtcatggtccttggcttgttcgtgcccccggtgttcgtcgttagctacgccaaggacctgggagtgcctgataccaaggctgcatttctcctgaccattcttggtttcatcgacattttcgctcgacctgctgcaggttttgtcgcaggccttggaaaagtccgcccatattccgtctacctcttttcgttttccatgtttttcaacgggttggcagatcttgcaggttcgacggcaggtgattacgggggactcgtggtgttttgcatcttctttggcatctcatacggtatggtgggagcgttgcagttcgaagtgctgatggccattgtgggaactcataagttttcatcagcaatcgggcttgtccttctcatggaagcggtggcagtcctggtcgggcctccctccggaggtaagctgctcgacgctactcatgtgtacatgtacgttttcatcctggcaggtgctgaagtgctgacctcgtcgcttattctccttttgggtaacttcttttgtatccgtaagaagcctaaagaaccccagcctgaggtggctgcagcagaagaggaaaagctgcataaaccacctgccgactcgggggtggatttgagagaggtggaacactttctgaaagcggagccggagaaaaacggagaggttgtgcacacgcccgaaaccagtgtg

SEQ ID NO: 33729 - DNA, 1395 bp, synthetic construct
  misc_feature 1..1395: note = Description of Artificial Sequence: Synthetic coding sequence
  source 1..1395: mol_type = other DNA
atgggaggagccgtcgtcgatgaaggccctactggggtgaaagcgccggacggcggatggggatgggccgtgctgttcggatgtttcgtgatcactggctttagctacgcatttccaaaggccgtgtctgtgttctttaaggagttgatccaggagtttggcatcggatactccgataccgcttggatctcatccatactgctggcaatgctgtatggtacgggaccgctgtgttcggtgtgcgtcaatcggtttggatgtcggcccgtcatgctggtcggtggattgtttgcgagcctgggaatggtcgcggcctcgttctgccgctcgatcatccaagtctacctgactactggtgtgatcaccggactggggctcgcattgaacttccaacccagcctcatcatgctgaaccgctacttctccaaacgccgcccaatggcaaacgggctcgccgccgctggatccccggtctttctctgcgcgctgagtcccctgggtcaactgctccaagaccggtacggatggcgaggtgggttcctcatactgggaggactgctcctgaattgctgtgtgtgcgcagcccttatgaggcccctcgtggtgaccgcacagccgggctcaggaccgccgcgcccgtcgagacggctgcttgacctgtcggtgttccgcgaccggggcttcgtgttgtacgctgtcgctgctagcgtgatggtgctcggactgttcgtgccgccggtgttcgtagtgtcctacgcgaaggatctcggcgtgccggataccaaagcggccttcctcctgaccatcctgggcttcattgatatcttcgcaagacctgccgctgggtttgtggcggggcttggaaaggtgcggccgtacagcgtctacttgttttccttctccatgttcttcaatggcctcgcggacctggccgggtcaaccgccggcgattacggcggcctcgtggtgttctgcatcttttttgggatctcctacggcatggttggagctcttcagttcgaggtgctcatggctatcgtgggtactcacaagtttagcagcgccatcggactggtgttgttgatggaggcagtcgcggtcctcgtgggacctccaagcggaggaaagctcttggacgcgacccacgtctacatgtatgttttcatcctcgccggagcggaggtcctgacctcatccctcatcttgctgctgggtaacttcttctgtatccggaagaagccgaaggaaccacagcctgaggtggcggccgccgaagaggagaaactgcataagccgccggccgattctggggtggacctgcgcgaggtcgagcatttcctgaaagctgaaccggagaagaatggcgaagtggtccacacgccagaaacttcagtg

SEQ ID NO: 33730 - DNA, 1395 bp, synthetic construct
  misc_feature 1..1395: note = Description of Artificial Sequence: Synthetic coding sequence
  source 1..1395: mol_type = other DNA
atggggggagcagttgtggatgaagggccgactggggtcaaagcacctgacggcggctgggggtgggccgttctgtttggctgcttcgtgatcacaggcttcagctatgcctttccaaaagcagtgtccgttttctttaaagagctcattcaagaatttggcattgggtattcagacacagcatggatttcctccatacttctagctatgctttatggaacggggcccttgtgtagtgtctgcgtgaaccgcttcggctgtcgccccgtgatgctcgtcggcggattattcgccagcctaggtatggtggccgcctctttctgtaggtctatcatccaagtttacctcacaactggagtgattactgggctaggcttggcgctgaacttccagccgtctctaattatgctgaacaggtatttctctaaacgcaggcctatggcaaatggtctggcagccgcagggtctcctgtatttctttgtgccctaagccccctcggtcagttgctgcaagacagatatggctggcggggcggatttctcatcttaggtggactgctccttaattgctgcgtgtgtgcagccctgatgcggcccttagtcgttactgcacagcccggttcaggaccacctcgccctagtaggcgtctactggatctctctgtattccgagatcgcggattcgtgttgtacgccgtggctgcctcagtgatggttctgggactgttcgtgcctcctgtcttcgtcgtgtcctatgccaaagacctcggagtgccagataccaaagctgcgttcctgctgactattttgggatttatagacatctttgcacgcccggctgcaggatttgtggccggactgggaaaggtgagaccatattccgtgtatctgtttagcttcagtatgttttttaacggtttggcagacttagccggctctactgctggagactatgggggcctcgtggtattctgtatttttttcggcatatcctatggcatggtgggagctctgcaatttgaggttctgatggccatcgtaggcactcacaaattcagtagcgctatcggacttgtactgctgatggaggctgtggccgtcctagttggcccaccttccggaggaaagctgttggacgcaacgcacgtctacatgtatgtcttcatcctagccggcgcagaggtgttgacctcaagtcttatcctcctactcggtaatttcttctgtatccgcaagaagcctaaggaacctcagccagaggtggctgctgccgaggaagagaaactacataagccccccgccgattcgggagttgacttgcgagaggtagaacacttcctcaaagcggaacctgaaaagaacggagaggtcgtccataccccagaaacttcagtg

SEQ ID NO: 33731 - DNA, 1395 bp, synthetic construct
  misc_feature 1..1395: note = Description of Artificial Sequence: Synthetic coding sequence
  source 1..1395: mol_type = other DNA
atggggggcgcggtagtggacgaggggcctaccggagtgaaggcccctgacggaggctggggctgggcagtgctttttgggtgttttgtgattactggcttctcatacgcatttcctaaggcagtgagtgtcttctttaaggagctcattcaggaattcggcattggctattccgataccgcttggatcagcagtattttactcgccatgctgtacggtaccggcccattgtgttctgtgtgtgtcaaccgattcggctgtcgccctgtgatgctggttggtggcttatttgcctccttagggatggttgctgcttctttttgccgctctatcattcaggtctatctgacaaccggagttatcacagggctcggcctcgctttgaattttcagccgtccctgatcatgctcaatcggtacttttctaagaggagacccatggccaatggcttggccgcggctggaagccctgtattcctctgtgccctgtccccactcggacagctgttacaggaccgctacgggtggcggggagggtttctgattttgggtggtttgctcctgaactgctgcgtttgcgcagctctaatgagaccgcttgtggtcacagcacagccgggctccggtccacccagacctagtcgcaggctgctggacctgagtgtgttcagggatcggggttttgttttgtacgccgtagcagcctctgtgatggttttgggtctgttcgttccacccgtcttcgtggtcagttatgcaaaggatctgggggtgcccgacactaaagccgctttccttcttactatcctgggtttcatcgatatttttgcaaggccggctgctggttttgtcgcagggctgggtaaggtccgcccttacagcgtgtacttattctcgttctctatgttctttaacggcctggccgatctggccggttcaaccgctggagactacgggggtcttgtggtattctgtatcttttttggcatcagctatggcatggttggagcgctgcagttcgaggttttaatggcaatcgtaggtacacacaaatttagctcggcaattggcctcgtcttgctgatggaggccgtcgcagtgctggttgggccaccaagcggcggcaaattgctagatgccactcatgtgtacatgtatgtgtttatccttgcgggtgcagaggttcttacctcctcgctgatcctactacttggtaatttcttctgtataagaaaaaagcctaaagagccccaaccggaagttgctgctgctgaggaagaaaagttgcacaagccccccgccgacagcggagtggacctcagagaggttgagcactttcttaaggctgaaccagagaagaacggagaggtagtgcacactcctgagacatcagtg

SEQ ID NO: 33732 - DNA, 1395 bp, synthetic construct
  misc_feature 1..1395: note = Description of Artificial Sequence: Synthetic coding sequence
  source 1..1395: mol_type = other DNA
atgggaggagcagtcgtggatgagggcccgaccggtgtgaaggccccagatgggggatgggggtgggccgttctctttggctgtttcgtgatcaccggatttagctacgcgtttccaaaagctgtgtcggttttcttcaaagagctgatccaggagttcggcatcggttatagcgacacggcatggatctcgagcatcctgctggcaatgctctacggaactggacctttgtgtagcgtgtgcgtgaatcgcttcggttgccggccggtaatgctggttggcggactgttcgccagcctgggaatggttgctgccagcttttgccgctctatcatccaagtgtacttgactactggcgtgattacgggactgggtttggcgttgaactttcagccgtccctcatcatgctgaatcgatactttagcaagcgtaggcccatggctaatggactggcagcagccggctctcctgtgttcctttgtgcactgtccccactcgggcagcttctccaggaccggtacgggtggcgaggtggcttcctcatccttggtggactgctcctgaactgctgtgtgtgcgctgccctgatgcggccactcgtggtgaccgcgcaacctggttccggaccgccaagaccgagccgccgactcctcgatctctcggtgtttcgcgacagggggttcgtgctgtacgctgtcgcagcatcggtgatggtgctgggcctgtttgtgcccccggtgtttgtcgtgtcatacgcaaaggacctgggcgtgcctgacactaaagccgcgttcctcttgactatcctgggcttcatcgacatcttcgcccgcccggctgccgggttcgtggccgggctggggaaggtgaggccatacagcgtgtatttgtttagcttctcgatgttcttcaatggattggctgacctcgctggatcaactgcaggagattacggcggactggtcgtgttctgcatcttttttggaatttcttacggaatggtgggggcgctccagttcgaggttcttatggccatcgtcggcactcacaagttctcgtccgcaatcggcctggtcctgcttatggaagcggtcgccgtcctggtgggacccccatcaggcggtaagctgctcgacgcaacccacgtttacatgtacgtgttcatcctggctggggcggaagtgcttaccagctcgctgatcctgcttctgggaaacttcttctgcattagaaagaaaccaaaggaaccacagccggaagtggccgcggctgaggaagaaaagctgcacaagccgccggccgactcgggcgtcgatctgcgggaagtggaacatttcctgaaagcagagccagaaaagaacggagaagtggtccacactccagaaacttcagtg

SEQ ID NO: 33733 - DNA, 1395 bp, synthetic construct
  misc_feature 1..1395: note = Description of Artificial Sequence: Synthetic coding sequence
  source 1..1395: mol_type = other DNA
atgggtggcgctgtcgtcgatgaaggcccaactggagtaaaggcaccagatggcggatggggatgggccgtcctgtttggctgctttgttattactgggttttcttacgcctttcctaaggccgtgagcgtgttcttcaaagaactgatccaagagttcggaataggctactcagacaccgcatggattagctctatcctcctggcgatgctgtacggaaccggccctctgtgcagcgtgtgcgttaaccggtttggctgcagacccgtgatgctagttgggggcctattcgccagcctgggaatggtggcggcctccttctgtaggagcatcatccaggtttatttaaccactggagtcattactggtttgggactggctctcaatttccagcccagcctaatcatgctgaaccgatatttcagtaaaaggagacccatggctaatggcctagccgccgcaggcagtccagtgttcctttgcgccctgagtcccctgggccagttgctgcaggacaggtacggctggagaggcggattcttgatcctaggcgggctccttctgaattgttgtgtttgcgctgccctgatgcggcccctggtggtgacagcccaaccaggctctggacctccaaggcccagcagaaggcttttagatctctcagtctttcgtgacagggggtttgttctgtacgccgtggccgccagcgtgatggtgctgggattgttcgtgccacccgtcttcgtggtcagctacgctaaggatttgggggtgcccgacactaaggctgccttcctgctaaccatcctgggcttcattgacatctttgcccggcccgctgctggcttcgtggccgggcttgggaaggttagaccttactccgtgtatttgttctcattttccatgttttttaatggtctggctgacctcgctgggtctactgccggggattatggagggcttgtggtgttctgcatcttttttgggatttcttatggcatggttggcgcactccaatttgaagttctcatggcgatcgttggcacgcacaaattttctagcgccattggactggtgcttctgatggaggccgttgccgtcctggttggccccccatccgggggtaagcttttggacgcaacccacgtgtatatgtatgtattcatcctcgcaggggcagaagtcttgacctcttcattaatactgctattggggaactttttttgcattaggaagaagccaaaggaaccccagcccgaagtcgccgcggccgaggaggagaagctgcacaagcccccagctgatagcggcgtggatctgcgggaggtggagcattttctcaaggcagagccagaaaagaatggtgaggttgtgcatacccctgagactagcgtc

SEQ ID NO: 33734 - DNA, 1395 bp, synthetic construct
  misc_feature 1..1395: note = Description of Artificial Sequence: Synthetic coding sequence
  source 1..1395: mol_type = other DNA
atgggcggcgctgtagtcgatgagggaccaactggcgtcaaggcccctgatggcggttggggttgggcagtactttttggttgtttcgtgatcaccggcttctcttacgccttcccaaaagccgtctccgtatttttcaaagagctaattcaggaattcggcatcgggtattcagatacggcctggatcagtagcatattattggccatgctttatggaactggacctctttgttccgtgtgcgtcaatagatttggttgccgacctgttatgctagtgggaggactttttgcctcattagggatggttgcagcaagcttctgcagaagcatcatccaggtatacttgactaccggcgtcataaccggcctcgggttggcgctgaacttccagcccagcttgattatgctaaatcggtatttcagcaagcgtcggccgatggcaaatgggctggcagctgcaggatcaccagttttcctctgtgctctgagtcccctaggccagttgcttcaagacagatatggatggcgcggcggattcttaatcctgggtggcctcctcctgaattgttgcgtgtgcgcagccctgatgcgccccctcgtcgtgactgcccagcctgggtctggaccaccacgcccaagtagacggctgttagacttatcggtttttagggaccgaggttttgtgttgtatgcggtggccgcaagtgtcatggttcttgggctgtttgtacctcccgtcttcgttgtctcttatgccaaggacctcggtgtccccgacacaaaagccgcgttcctacttaccatcttaggcttcatcgacatttttgcccgcccagctgccggatttgtagccggcctcggaaaggtccgcccatacagcgtgtatttgttcagtttctccatgttctttaatggactggccgatctggccggcagtactgccggagattacgggggcttggtagtgttctgtatttttttcggcatttcgtacgggatggtaggagctctccagttcgaagtcctgatggcaatcgtaggaacccacaaattcagctctgccattggactagtcttattgatggaagctgtggcagtcctggtcggacctccctccggcgggaagttgctggacgctacacacgtgtatatgtatgtttttatccttgccggggctgaggttcttacatcaagtctgatcctactgctcgggaactttttttgtatccggaaaaaacctaaagaaccccaaccggaggtagctgcggctgaggaagaaaaactgcacaaaccacctgccgattcaggcgttgatctgcgcgaggttgagcactttctcaaggctgaacccgaaaagaacggcgaagtcgttcacactcccgaaacctctgtc

SEQ ID NO: 33735 - DNA, 1395 bp, synthetic construct
  misc_feature 1..1395: note = Description of Artificial Sequence: Synthetic coding sequence
  source 1..1395: mol_type = other DNA
atgggcggagcggttgtggacgagggacctactggtgtcaaggcaccagatggcggctgggggtgggccgtgctgtttggttgctttgtcattaccggattcagctacgcatttccaaaggccgtttcagtgttctttaaggagctcatccaggaattcggtattggttacagcgatacggcatggatctcctccattctccttgcaatgctctacggaaccggacctctgtgttccgtgtgtgtcaatagatttggttgcagaccggtgatgttggttgggggtcttttcgctagccttgggatggtggcagccagcttctgccgctcgattattcaagtctacctgaccaccggggtgatcacggggctcggacttgccttgaatttccaaccttccctgattatgcttaacaggtacttcagcaaaagacgtccgatggcaaacggtcttgctgccgcgggatcgccggtctttctctgtgcactctcacccctgggacagcttctccaagaccgttatgggtggagaggaggttttttgattctggggggcctccttctgaactgctgcgtgtgtgccgcactgatgcgtcctcttgttgtcactgcacagcctggttcaggaccaccaagaccttcgcgcagactgcttgacctctccgtctttagggaccgcgggttcgtgctctacgccgtggcggcatccgtgatggttctgggactgtttgtgccccccgtgtttgtcgtctcgtacgcgaaggatcttggcgtccctgatactaaagctgcattcctgctgaccattctggggtttatcgacatatttgcgcgacctgccgcaggatttgttgcaggacttggaaaggtgcgcccttactccgtgtatcttttctcatttagcatgttctttaacggcctggcggatctggcaggatcgaccgcaggcgattacggaggcctggtggtgttttgtatcttctttgggatcagctacggaatggtcggtgcccttcaatttgaagtgcttatggccatcgttggcacgcataagttctcgtccgcaatagggctcgtgctgctgatggaggctgtggcagtgttggtggggcccccatcgggtggaaagctgctcgatgcaactcatgtgtacatgtacgtgttcatccttgcgggtgcagaggtgcttacctcttccctgattctgttgcttggtaacttcttttgcatccgtaagaaacccaaagagccgcagcccgaagtcgcagcggctgaagaggagaagctgcataagcctcctgccgactcaggagtggatctcagggaagtggaacactttcttaaagccgaaccagaaaagaatggagaagttgtccacaccccagaaacgagcgtg

SEQ ID NO: 33736 - DNA, 1395 bp, synthetic construct
  misc_feature 1..1395: note = Description of Artificial Sequence: Synthetic coding sequence
  source 1..1395: mol_type = other DNA
atgggaggggcagttgtggacgaagggcctactggggttaaagctccagacggcgggtggggctgggcggtactgttcggttgtttcgttataactggtttctcttatgcctttcccaaggctgtaagcgtgtttttcaaggaactcatacaggagtttggaattggctatagcgatactgcctggatctcttcaattctccttgccatgctctacggcacagggccactgtgcagcgtatgcgtaaatcggtttggctgccggcccgtcatgctggtgggcggcctattcgcatccttgggcatggttgccgcctctttttgcagatctatcatccaagtctacctgacaacaggagtaattaccggccttgggctggcactcaactttcagccttctctgattatgcttaacagatatttttctaagcggaggccaatggccaacgggctagctgcagcaggatcacctgtgtttctgtgtgcactgtctccactagggcagctgctccaggatagatatgggtggcgcggcggatttctgatcctgggaggccttttgctgaattgctgcgtgtgcgccgcccttatgcggcctttggtagttacagcccagcccggctctgggcctccccgcccgtcaaggcgcctgctggatctgtcagtcttccgggacagggggttcgtgttatatgccgttgccgcctctgtcatggttttaggcctgtttgtgcctcccgttttcgtggtttcctacgcaaaagaccttggggtaccggacactaaggcagcgtttcttctcaccattctgggcttcatcgacatattcgcgagacctgccgcgggatttgtggcaggcttgggcaaggtgcggccatattcagtttacctgttcagcttctccatgttcttcaacggcctggccgacctggctggcagcacagccggcgattatggcggcctcgtggtcttctgtatcttcttcggcatttcgtacgggatggtaggcgcgctccagtttgaagttctgatggcaattgttggaacccacaagttttcatccgcgatcggattagtgctcctcatggaggccgtagccgtgctcgtgggccccccttctggaggtaagctcctcgatgccacacatgtttacatgtatgtcttcatcctagcgggagccgaggtgttaaccagctctctcattctgctgttgggaaacttcttctgcattaggaaaaagccaaaagagcctcagccagaagtcgctgccgctgaggaggagaaacttcacaaaccacctgctgatagcggggttgacctcagagaggtggaacattttctgaaggccgaaccagaaaagaacggcgaagtggtgcatactccagagacctcggtg

SEQ ID NO: 33737 - DNA, 1395 bp, synthetic construct
  misc_feature 1..1395: note = Description of Artificial Sequence: Synthetic coding sequence
  source 1..1395: mol_type = other DNA
atggggggcgccgttgtggatgaaggccctacaggggtgaaggcacccgatggcggctgggggtgggccgtgctctttggatgtttcgttattacaggatttagctatgccttcccaaaagccgtgtcagtgtttttcaaggagctaatacaagagttcgggatcggctactccgatactgcatggatctcttcaatcctactggccatgctttatggaaccggccctctgtgcagtgtttgcgtcaatcgctttggctgcaggcccgtcatgcttgtaggcgggctgttcgcgtccttgggcatggttgcagcttccttttgccgctctatcatccaggtctacctcacaacaggcgtgattaccggcctgggcctggcactgaacttccaacctagcttgatcatgctgaatagatatttctcaaaacggcgtcccatggcaaacggtttagcagcagccgggagtccagtgtttctgtgcgctttgtctcccctgggccaactgctccaggaccggtacgggtggcgggggggttttctaattctcgggggtctcctcctgaactgctgcgtgtgtgcggcccttatgagacctttggtcgtgacagcccagcctggcagcggtccaccccgaccttcacgtaggctcctggacctgtccgttttcagagatcgagggtttgtgttatacgctgtggccgcttcagtcatggtgctgggcctctttgtgccgcccgttttcgtggtgagctacgccaaagatctcggagtaccagacactaaggcagcgtttttgctgaccattctgggatttatcgacatttttgcacgacctgcagccggtttcgtggcaggactaggcaaagtgagaccatacagtgtgtacctcttttccttcagtatgttcttcaatggacttgccgacctggccggatccaccgccggtgactatgggggcttagtggttttctgcatattttttggaatttcatatggcatggtaggggccctgcagttcgaagtactcatggccatcgtcggcacgcacaagttctcatccgcaataggcttggtgctgctgatggaggccgtcgctgtgctggtagggccgccctctggcggcaagctgctcgatgcgacacatgtgtacatgtatgtgtttatcctcgctggtgccgaggtgttgacctcttctctgatcctcctgcttggcaatttcttttgcatccgaaaaaagcccaaggagccgcagccggaagtcgccgccgcagaggaggaaaaactgcacaaacctccagcagactccggtgtagacctcagggaggttgaacatttccttaaggctgagcccgagaaaaatggagaggtcgttcatacacccgagacaagcgtc

SEQ ID NO: 33738 - DNA, 1395 bp, synthetic construct
  misc_feature 1..1395: note = Description of Artificial Sequence: Synthetic coding sequence
  source 1..1395: mol_type = other DNA
atggggggtgctgtggtagatgaaggccctacgggggtgaaagcgcctgatggcggatggggctgggccgtccttttcggttgcttcgtcataactgggttttcctatgcattcccgaaagctgtgtccgtcttcttcaaagaactcatccaagagttcggtatcggctatagcgatactgcctggattagctccatactgctagcaatgctctacggaaccggcccactgtgttcagtgtgtgttaaccgcttcggctgccgcccagtcatgctggtcggcggccttttcgcctctctgggcatggtggccgcctccttttgcagatcaattatacaggtgtatttgaccaccggagttattaccggtctcggactagcactgaacttccagccaagcctgataatgctgaacagatacttttccaagcgtcgtccaatggctaacggcctcgctgcagccggatccccggtgtttctctgcgccctgtcccctttaggccagctactacaggaccggtatggctggcgagggggcttcctgatcctgggaggcttgctgttaaattgttgcgtgtgtgccgcccttatgcgacccctggtggtgaccgcccagcccggatccggccctccccgcccgtcaaggaggcttctggacctgagtgtgttccgtgaccggggttttgtgctctacgctgttgctgcgagtgttatggtcctaggactcttcgtaccgcccgtgttcgtggtctcctacgccaaggatctcggcgtgccagacaccaaagccgcctttctgctcactattttaggatttattgatatttttgccaggccggcagcaggatttgtagcagggctggggaaggtgcgtccgtacagcgtttatctatttagcttctccatgtttttcaacggactggcagatctggcaggctccacggcaggcgactatggcgggttagtggtgttctgcatcttcttcggcattagctatggcatggtgggtgctctccagttcgaggtgcttatggccatcgtgggaacccataaattctcctccgctatcggtctggtcctcctcatggaagccgtcgctgtcttggtggggccaccgagtgggggtaagctgttggacgctacgcatgtgtatatgtacgtgtttatcctggccggtgccgaagtgctgaccagttcccttatcctcctgctcgggaatttcttttgcattaggaagaagcccaaggagccacagcctgaggttgccgctgccgaggaggagaagctccacaagcctccagccgattccggcgtcgatttgcgggaagtggagcacttcctgaaagccgagccagaaaagaatggcgaggtcgtgcatacccctgaaacctctgtc

SEQ ID NO: 33739 - DNA, 1395 bp, synthetic construct
  misc_feature 1..1395: note = Description of Artificial Sequence: Synthetic coding sequence
  source 1..1395: mol_type = other DNA
atggggggagcagtcgtggatgagggcccaactggagtgaaagcacctgacggaggctggggatgggctgtcctctttggttgcttcgttatcacgggtttttcttatgcattccctaaggccgtgtccgtgttctttaaagaattgattcaagagttcggcattggttactcggataccgcctggatttcctcaattttgcttgcgatgctttatggcactgggccgctatgctccgtctgtgttaatcgctttgggtgtcggccggttatgcttgtaggggggctcttcgcttctctgggcatggtggctgcatcattttgtcgctcaataatccaggtataccttacaacgggcgtgattaccggccttggtttggccttaaatttccaaccttcgcttatcatgcttaatcgatacttctcgaaacggcgccctatggcaaatggtctggcagcagccggctctcctgtcttcttgtgtgcgttgtcgccgctgggacaactcctacaagaccggtatggttggcgcgggggatttttaattttgggtggtctgctgctgaattgttgtgtttgtgcggcgctcatgcggccgctagtggttactgcccaacccggatcaggacccccccgcccatctagacgccttttggacctgagtgtcttccgagatcgggggttcgttctttatgctgtggcagctagcgtgatggtgctgggattgttcgtgcctcctgtttttgtggtttcctatgctaaggatttgggggtccccgacacgaaggcagctttccttctaaccattctcggattcatcgacatcttcgcccggccagctgctggctttgtggctggccttggaaaggtccgaccttacagcgtttacctcttctcgttctcgatgttcttcaacggcttagccgatctggcaggatcaactgcaggagattatgggggtctcgttgtattctgtatcttcttcgggatatcgtacgggatggtaggcgcacttcagttcgaagtgctgatggctatcgtagggactcacaaattctcaagtgctattggcctcgttcttcttatggaggcagttgcagtacttgtgggccctccttccggaggtaaactgctagacgctacacatgtctatatgtatgtctttattttagctggagctgaggttctgacaagttccctcatcttgttgttaggaaacttcttttgcattcggaaaaagcctaaggagcctcaaccggaagtcgcagcagctgaagaggagaaacttcataaaccaccagcggatagcggagtagacctgcgtgaagtagagcacttcttgaaggctgaaccagaaaagaacggagaagttgttcatacgcctgagacctccgtg

SEQ ID NO: 33740 - DNA, 1395 bp, synthetic construct
  misc_feature 1..1395: note = Description of Artificial Sequence: Synthetic coding sequence
  source 1..1395: mol_type = other DNA
atgggcggagcggtcgtcgacgaaggcccgacaggcgttaaagcgccggacggcggctggggttgggctgtactcttcggttgcttcgttattacaggtttctcttatgcatttccaaaagcagtctccgtattttttaaggaactgatccaagaattcgggatcggttactctgacacggcttggatttcgagcatactccttgccatgctgtatggaacgggtcctctgtgctcagtctgtgttaatcgctttgggtgccgcccggttatgcttgtaggtggattgtttgcatcattagggatggtcgccgcgagcttctgccgatcaattattcaggtttacctgacaacaggggtgatcacaggtttaggcttggccttaaatttccaaccgtctttgattatgcttaatcgatattttagcaaacgtcgtccgatggctaatggactggcagcggcgggatcgcctgtctttctgtgtgcgttgagcccgctgggacaacttttgcaagatcggtatgggtggcgcgggggctttttaattctgggtggattgttgcttaattgctgtgtctgcgctgcccttatgcggcctttggttgtaacggcgcagcccggttccgggccgccaagaccaagcaggcgtttacttgatctgtctgtatttagagacagaggattcgttctgtacgcggtcgctgccagcgttatggtcctgggactcttcgtgcctcctgtttttgttgtttcttacgcaaaggacttgggcgtgccggatacaaaagcagctttcctgcttacaatcttagggtttatagatatttttgcacgtcctgctgcagggtttgttgcaggtctgggaaaagtcagaccgtattcagtgtatttattcagcttttcaatgttctttaatggccttgcggatctagctggttccacagcgggcgactatggaggactcgttgtcttttgcattttttttggtatctcatatggcatggtgggcgcccttcaatttgaggtgttgatggcaattgtcggaacgcataaattctcatctgccattggcctggtgctgcttatggaagcggtcgcggtcttggttggaccgccatcaggtggaaaattattagacgcaacccatgtgtatatgtacgtgtttattttagcgggcgcagaagttcttacatcaagccttattttgctcctgggcaatttcttctgcattcgcaagaaaccgaaggaaccccaaccggaggtggcagcggctgaggaagagaaactccataaaccaccggcggattcaggagtggatttgagggaagttgaacacttccttaaggctgaaccagaaaagaacggggaggtcgtgcacacgccagagacgtcagtt

SEQ ID NO: 33741 - DNA, 1395 bp, synthetic construct
  misc_feature 1..1395: note = Description of Artificial Sequence: Synthetic coding sequence
  source 1..1395: mol_type = other DNA
atgggcggggcagtcgttgatgaaggtcctacgggggtgaaggcaccagatggaggatggggatgggcagtgctttttggttgtttcgtgatcactggcttttcctacgcattccctaaggccgtttccgtgtttttcaaggaacttattcaagaatttgggattggctactcggacactgcttggatcagctcgatacttcttgccatgctgtacggaactggcccactctgttctgtgtgtgtcaatcgctttgggtgcaggccggtgatgctcgtgggcggactctttgcgagccttggcatggtggcagcatcgttctgccggtcgattattcaggtctatctgacgactggggtgattaccggactcggattggccctgaacttccagccatcacttatcatgctgaatcggtacttttccaaaagacgaccgatggctaacgggcttgccgcagcaggcagcccagtctttctctgcgcactgtcacccctcggtcagctcctccaagatcgctacggttggcggggtggctttcttatccttggtggccttcttctcaattgctgtgtgtgtgcggcgctgatgcggccccttgtggttaccgcacaacccggatcgggacctcccagacctagcaggagactgttggacctttcggtgtttcgcgaccggggtttcgtcctgtacgcagtggccgcctcggtcatggtcttgggactctttgtgccacctgtgtttgtggtgagctatgcaaaagaccttggtgtccctgatactaaggcggcatttctgcttactattctgggctttatcgacatcttcgccagacctgccgcagggtttgtggcagggctcggtaaggtccgaccttactcggtgtaccttttctcattctcgatgttctttaacggacttgcagacttggcaggcagcaccgcgggagattacgggggactcgtggtgttctgtatcttttttggaatttcatacggtatggtgggggcacttcaattcgaggtgcttatggccatcgtgggaacccacaagttttcatctgcgattggtttggttcttctgatggaagccgtcgcagtccttgtgggcccaccgtcgggaggtaaacttctcgacgcaactcatgtgtacatgtacgtctttatcctcgctggtgcagaggtgctgacctcctcgctcattctccttctgggtaactttttctgtatacggaagaagccaaaggagcctcaacccgaggttgccgcggcagaggaagagaagctgcataaaccgcctgctgattccggtgtcgatctgcgagaggtggaacacttccttaaggcagaacccgaaaagaatggggaggtggtgcatactccagaaacttcggtg

SEQ ID NO: 33742 - DNA, 1395 bp, synthetic construct
  misc_feature 1..1395: note = Description of Artificial Sequence: Synthetic coding sequence
  source 1..1395: mol_type = other DNA
atgggaggcgccgtggttgacgaaggccctaccggggtcaaggccccggatggcggatggggatgggcagtgctgtttggttgtttcgtcatcactggtttctcatacgcattccccaaggccgtctcggtctttttcaaagaactgatccaggagtttggcatcggatactccgacaccgcctggatctcctcgatactgctggcaatgctctacggtaccggccctctctgttcggtgtgcgttaatcgctttggatgcagaccagtgatgcttgtcggaggcctgttcgcctccctgggcatggtggccgcctcattctgcagatctataatccaggtctacctgactaccggggtgatcactggattgggtctggccttgaacttccagccgtcgctcatcatgctgaaccggtacttctctaagagaaggccaatggcaaacggcctggcagccgcgggcagcccagtgtttctctgcgccctgtccccactggggcaactcctgcaagatagatacggatggcgcggcggattcctgatcctcggaggcctgctgctgaattgctgtgtgtgcgccgcgctgatgcgcccgctggtggtcactgcccaaccggggtcggggccgccgaggccgtcccggaggctgcttgacctcagcgtgttccgcgaccgcggtttcgttctctatgctgtcgcggcctccgtcatggtgctgggactcttcgtgccaccggtattcgtggtcagctacgcaaaggacttgggcgtcccggatactaaggcagcattcctgctgaccatcctgggattcattgacatcttcgcccggcccgcggccggcttcgtggcgggacttgggaaggtaagaccatactcggtgtacctgttcagcttctcaatgttctttaacggactggctgacctcgcggggagcaccgccggagactacggaggtctggtcgtgttctgtatctttttcggaatttcctacggtatggtgggtgccctgcaatttgaagttctgatggccatcgtggggactcacaaattctcctcggcgatcggactggtcctgcttatggaagcagtggctgttctcgtgggccctccgtcgggaggtaagttgctcgatgccacccacgtctacatgtacgtctttatcctggccggagccgaggtcctgacttcgtcattgattctgctccttggaaatttcttctgcatcaggaagaaaccgaaggaaccgcagccggaagtggccgcggcagaagaggagaaactgcacaagcccccggccgactccggcgtggacctgcgcgaggtcgagcatttccttaaggctgagccggaaaagaatggagaagtggtgcacaccccggaaacttcagtc

SEQ ID NO: 33743 - DNA, 1395 bp, synthetic construct
  misc_feature 1..1395: note = Description of Artificial Sequence: Synthetic coding sequence
  source 1..1395: mol_type = other DNA
atggggggcgcagtggtggacgaaggacctactggagtgaaggcaccagatggcgggtggggttgggccgtcctgtttgggtgttttgtcataaccggcttctcatacgcgtttccaaaggcggtcagcgtattctttaaggaacttattcaagagtttggtattgggtattcggacaccgcttggatttcctcgatccttctcgctatgctgtacgggaccggacccctgtgttcggtgtgtgtgaatagatttggatgtcggccggtgatgctggtcggggggttgtttgcgtccctgggaatggtggcagcatcattttgtcgttcgattattcaggtctacctgactacgggagtcatcactgggctgggtctggcactgaactttcaaccatccctcattatgttgaatagatactttagcaaacggcgacctatggctaacggtctggccgcagccggatcgcctgtgttcctgtgcgccctctcacctctggggcagctgttgcaagatcgctacgggtggcgcggggggtttcttatactcggaggtttgctgctgaattgctgtgtgtgtgccgcgcttatgcgcccccttgtggtcaccgcacaaccaggatccggaccaccccggccttcgagacgcctgctggatctttcagtatttagggatagaggttttgtgctctacgcagttgcagcaagcgtcatggtgctgggtctgttcgttcctcctgtgtttgtggtgagctacgcaaaagatttgggtgtccctgatacgaaagcagcattcctgctgaccatcctcggatttatcgacatcttcgcgcgtccagcagcgggatttgtggcaggtctgggtaaagtaagaccctactcggtgtacctctttagtttctcgatgttcttcaacggacttgcggatcttgcaggatccaccgcaggtgattacggcggtcttgtggtcttttgcatattcttcggtatcagctacggcatggtgggagcattgcagtttgaagtgctcatggcaatcgtgggaacccacaagttcagttcagccataggattggtacttctgatggaggcagtggccgtccttgtgggacctccttccggtgggaagctccttgacgccactcatgtgtatatgtacgtgtttatactcgcgggagctgaagtccttactagctcacttatcctcttgctcggtaacttcttttgcattaggaagaaaccaaaggaaccgcagccagaggtggccgccgcagaagaagaaaagctgcataagccgccagcagattccggagtggaccttagagaagtcgaacactttctgaaggccgagcccgagaagaacggcgaggtggtgcatacccctgaaacttcggtc

SEQ ID NO: 33744 - DNA, 1395 bp, synthetic construct
  misc_feature 1..1395: note = Description of Artificial Sequence: Synthetic coding sequence
  source 1..1395: mol_type = other DNA
atgggaggcgccgtggtggatgaaggtcccactggggtgaaggctccagacggcggctggggctgggccgtgctgtttgggtgctttgtgataaccgggttttcctacgccttccccaaggccgtgtccgtgtttttcaaggaacttatccaggagtttggaatcgggtatagcgacactgcgtggatctcttcaattctccttgccatgctgtatggcacaggtcccctctgctccgtttgtgttaatagatttggctgtaggcccgttatgttagtgggcgggcttttcgcttcgctgggcatggtcgctgcaagtttctgtaggtctatcattcaggtgtacctaactacaggggtgattactggcttaggactcgcgctcaatttccagccatccttgattatgctaaacaggtatttttctaagcgacgaccaatggccaacggactggcagccgctggctccccagtgttcctctgcgccttgtcaccattgggtcaactcctgcaggacagatatgggtggcggggcgggttcctgatcctgggtggactcctgctgaactgttgcgtatgcgctgctttaatgaggcctttggtcgtaacagctcagcctggttcggggcccccaagacctagccgccgcctcctggacctgtccgtctttcgtgatcgggggtttgtcctctatgccgttgcagccagcgtaatggtgctgggattatttgtgccacccgtgttcgtggtgagctatgccaaggacctaggcgtgccagatactaaagcggcttttctgctcactatactaggctttatcgacatttttgcaagacccgcggctggctttgtcgccggcctgggaaaggttcgcccatacagtgtgtatctgttttctttcagcatgttcttcaacggactcgctgaccttgccggttcaaccgccggcgattacgggggtctcgtggttttttgcatcttttttggcatctcgtacggtatggttggggccctgcagttcgaagtcctcatggccatcgtgggaacacataagttcagttccgccattggcctggtgctcctgatggaagctgtcgcagttcttgtggggccaccctcaggagggaaactactcgatgccacccacgtttacatgtatgtttttattctggccggggcagaggtgctgacgagctctcttatcctgctattgggaaacttcttctgcatcagaaagaagcccaaggaacctcagcccgaagtggctgcggcagaggaagagaagctgcataaaccaccagcagacagtggcgttgatctgagagaagtggagcactttctcaaggcagaacccgaaaagaacggtgaggtggtgcacacaccagagacatccgtc

SEQ ID NO: 33745 - DNA, 1395 bp, synthetic construct
  misc_feature 1..1395: note = Description of Artificial Sequence: Synthetic coding sequence
  source 1..1395: mol_type = other DNA
atggggggggccgtggttgacgaaggccctacaggagtcaaggcccctgatggcggatggggctgggcggtcctgtttggatgttttgtgatcacaggattctcctacgcctttcccaaggccgtgagtgtcttctttaaagagctgattcaggagttcggaattggttacagtgacactgcatggatatcctccattttgctcgccatgctctacggaacagggccgttgtgctccgtctgcgtgaataggttcgggtgtaggcccgtgatgttggtgggaggacttttcgcttcactgggaatggtggccgcctccttctgcaggagcatcatccaggtctatctgacaacaggagtgattaccggactgggtctggccctgaacttccagccatctcttatcatgcttaaccgctattttagcaagaggaggcctatggccaatggactggctgcggctggctccccggtttttctgtgcgccctttcgccactgggccagcttcttcaggaccggtatgggtggcgcgggggatttctgatcctcgggggtctgctgctcaactgttgtgtttgtgccgcactaatgcgtcctttagtcgtaacggcccagcccggcagcggacctcctcgcccctctaggagacttctggatctatcagtcttcagggatagaggcttcgtgctgtatgctgttgccgcctctgtgatggtacttggtctattcgttccccctgttttcgtcgtgagctacgccaaagatttaggagttcctgacactaaagctgcttttctgctgactattctaggatttatcgatatcttcgcccgaccagccgctggcttcgtggccgggctgggcaaagtaaggccatattctgtctatctattttctttctctatgttctttaacggcttagccgatctggccgggtcaacagcaggagactacggcggactcgtggtgttctgtattttttttgggatctcctacggcatggtaggagcgctgcagtttgaggtgcttatggctattgtggggacccacaagttcagtagcgccattggcctcgtgcttctgatggaagctgtcgcggtactagtgggtcctcctagcggtggcaaactcttggacgccacacacgtttacatgtatgtgttcattcttgctggggccgaagtgttgacttctagtctgatcttactacttggaaattttttttgtataaggaaaaagcctaaagaaccccagcccgaggtagcagccgctgaggaggagaagcttcacaagcctcccgccgatagcggcgtagacctccgggaggtagaacattttcttaaggcagaaccagaaaagaacggcgaggtggttcataccccggagacctcagta

SEQ ID NO: 33746 - DNA, 1395 bp, synthetic construct
  misc_feature 1..1395: note = Description of Artificial Sequence: Synthetic coding sequence
  source 1..1395: mol_type = other DNA
atgggaggagcagttgtagatgaaggaccaactggtgtaaaagcaccagacggaggatggggatgggcagttttatttggttgttttgtaattacgggattcagttatgcatttccaaaagctgtgagtgtttttttcaaagaacttattcaagaatttggaattggatattcagatactgcatggatttcaagtattttacttgctatgctttatggaactggtccattatgttcagtgtgtgttaatagattcggatgtagaccagtaatgcttgttggtggtctttttgcatcacttggtatggtagctgcttctttttgtagatctattattcaagtttatttaacaactggtgttattacgggtttaggtcttgctcttaattttcaaccaagtttaattatgttaaatagatactttagtaaaagacgtccaatggctaatggactcgcagcagctggatctcctgtattcctttgtgcactttctccattaggacaattacttcaagatagatatggatggcgtggtggatttttaattcttggtgggttattattaaactgttgtgtgtgtgcagctcttatgagaccattagtagttactgctcaacctgggtcaggaccaccaagaccatcacgtcgtcttctagatttaagtgtttttagagatagaggttttgttttatatgctgttgctgcttctgtaatggttctcggattatttgttccaccagtttttgttgtttcatatgcaaaagaccttggagtgccagatacaaaagctgcatttcttcttacaatacttggattcattgatatttttgcaagaccagcagcaggatttgttgcaggacttggtaaagttagaccatattctgtatatcttttttcattctcaatgttctttaacggtttagcagatttagcaggatctacagccggagattatggaggacttgttgttttttgtattttctttggaatttcatatggaatggtgggagcattgcaatttgaagttttaatggcaattgttggtacacataaattttcatcagcaattggacttgttttattaatggaagcagttgctgttcttgttggaccaccaagtggtggaaaattactagatgctacacatgtttatatgtatgtttttattcttgcaggagctgaagtattaacttcttctttaattttattattaggaaattttttctgtatcaggaagaaaccaaaagaacctcaaccagaagtagcagcagctgaagaagaaaagttgcataagccaccagctgatagtggagttgatttgagagaagtagaacattttctaaaggcagaacctgaaaaaaatggtgaagttgttcatacacctgaaacttctgtc

SEQ ID NO: 33747 - DNA, 1395 bp, synthetic construct
  misc_feature 1..1395: note = Description of Artificial Sequence: Synthetic coding sequence
  source 1..1395: mol_type = other DNA
atgggtggagccgtggtcgacgagggacctacaggtgtgaaggcgcctgatggcggatggggctgggcggtcctctttggatgtttcgtcatcaccggcttttcttacgctttcccaaaagccgtatccgtgttttttaaggagcttatacaggagtttgggatcggatacagcgacaccgcttggatttcctcaatcctgctcgccatgctgtatgggaccggccccctgtgctcagtttgcgtgaacaggttcggctgtcggcctgtgatgcttgtaggcggcctgttcgcctcattggggatggtggccgctagcttttgtagatccattattcaagtctacctgaccacaggagtgatcacgggattaggtcttgccctgaatttccagcctagcctgattatgcttaataggtatttctcaaaacgccggccaatggctaacggtctcgctgccgcgggctcacccgtcttcctgtgtgctctaagcccccttggacagcttttgcaggaccgctacggctggagagggggatttctaatacttggcggtttgctgctcaattgctgtgtgtgcgctgcccttatgcggccattggtggttacagcccagcccgggagcgggccgcctcggccctcacggcgtttgttagatctctctgtgttcagagaccgtggcttcgtgttgtacgccgtggctgcaagtgtaatggtcttgggactgttcgtgccccccgttttcgtcgtatcttatgctaaagatctcggagttcccgacaccaaggcggctttcctcctcaccattcttgggttcatcgatatttttgcacgccctgctgctggcttcgtggctggtctcggtaaagttcgaccctacagtgtctatttattctccttttcaatgttttttaacggcttggcagatctggcaggtagtactgcgggtgactatggagggctggtggtgttttgcatctttttcggcataagctatgggatggtcggagcattgcagttcgaggtgctcatggctatagtggggacacacaagttttcatcagcaatcggcctcgtgttactgatggaggcagtcgctgtgctcgtggggccaccctccggaggcaaactactggacgccacccacgtctatatgtacgtttttatcctcgccggagcggaagttcttacatcctctctgatcctcctcctgggcaatttcttctgcatccggaaaaagcccaaggaacctcagccagaagtcgctgcagctgaagaggaaaaactgcacaagcctccagcagacagtggcgtggatttacgagaagtggagcacttcctgaaggcggagcccgaaaagaatggtgaggttgtgcacacccctgagactagtgta

SEQ ID NO: 33748 - DNA, 1395 bp, synthetic construct
  misc_feature 1..1395: note = Description of Artificial Sequence: Synthetic coding sequence
  source 1..1395: mol_type = other DNA
atggggggtgcagtcgttgatgagggacctaccggggtaaaggctcccgacggcggatgggggtgggctgtgctttttgggtgttttgtgatcacgggtttttcctatgcgttcccgaaggccgtaagcgtctttttcaaggaactcatccaagaatttggaatcggatactccgacacggcctggatcagttccattctgcttgctatgctctatggcaccggccccctctgcagtgtgtgcgtaaacagattcgggtgtaggcccgtcatgctggtcgggggccttttcgccagcctggggatggtggcagcctctttttgtcgatcaattattcaggtctatctaacaacaggcgtcataactggtctggggctggcattaaattttcagcctagcctgattatgctgaatcggtatttttcaaaaagaagacccatggctaacggattggccgctgctggtagcccggtgttcttgtgcgcactcagccccctgggacagctcctgcaggatcgttacggttggcgcggcggctttctgattcttggaggcctccttttgaactgctgcgtgtgtgctgccttgatgagacccctagtggtgactgctcagccggggtccggtccccccaggccctccagacgtctgttggatttgtccgtctttcgcgatcgggggtttgtgctgtatgccgtggcggcttctgttatggtcctaggtttgttcgtgccccctgtgttcgtcgtcagttacgccaaggatctgggtgtccccgatacgaaggcagcgttcctactcaccatcctgggcttcatcgacatctttgccagacccgcagctggcttcgtcgccggcctgggcaaggtccggccctactcagtgtaccttttttcattttcaatgttcttcaacggcctcgctgatctcgccggcagcactgctggagattatggcggcctggtagtgttctgcatcttcttcggcatttcatacggcatggtgggggcactacagttcgaggtccttatggccattgtcgggactcacaagttctcttccgccatcggcctggtcctgctcatggaagcagttgctgtactggtgggcccgccctccggagggaagctgctcgacgcaacccacgtctacatgtacgtgttcatcctcgccggggctgaagtcctgacatcctccttgattctcctacttggcaactttttttgcatcaggaaaaagcccaaggagcctcagccagaggtcgccgccgccgaggaggaaaagctgcataaacctcctgctgactctggagtagatctgagagaggtggaacactttctgaaagctgagcccgaaaagaatggagaggtggttcacacccccgagacctccgtg

SEQ ID NO: 33749 - DNA, 1395 bp, synthetic construct
  misc_feature 1..1395: note = Description of Artificial Sequence: Synthetic coding sequence
  source 1..1395: mol_type = other DNA
atgggtggcgctgtggtggacgaaggcccaaccggggtgaaggcacctgatggagggtggggctgggcagtgttgttcggatgcttcgtgatcacgggtttcagttacgctttcccaaaggctgtgagcgtgttcttcaaggagcttatccaagagtttggaatcggatattccgataccgcgtggatctcttcaattttgctggctatgttatatggtaccggtccgctttgttccgtctgtgtgaatcggttcggctgtcgcccagtcatgctggttggcggcctcttcgccagtctcggaatggttgctgcctctttctgcagatcaattatccaggtgtatctgaccacaggggtgattactgggcttggcctggctctgaacttccaaccatctttaatcatgttgaacaggtacttctcgaagaggcgaccgatggccaatggccttgctgctgccggctctcctgtttttctttgcgctctttctcctctgggacagctcctgcaggacaggtatgggtggaggggagggtttctcatcctggggggcttactgcttaactgttgtgtgtgcgcagccctgatgaggccactagtggtgactgcacagcctggatccgggcctcccaggcccagcaggaggttgcttgacctgagcgtgtttagagaccgcggatttgtgctgtatgctgtcgcggcatcagtgatggtgttgggcctgtttgtccctccagtgttcgtcgtgtcctacgccaaagatctcggagtgcctgataccaaagcagcattcctgttaacaatccttgggttcatcgacatcttcgcccgcccggccgcaggcttcgttgcaggactggggaaggtgcgaccctatagcgtgtacctctttagcttttccatgttctttaacggactggcagacctcgctggttctactgcaggagattatggcggattggtcgtgttctgtatcttctttggaattagctacggaatggtgggagcgctgcaatttgaagtgctgatggcaatcgtgggtactcataaattctccagcgcaatcggcctggttttgctcatggaagcagtggccgtcctggtcggcccaccttccgggggaaagctcctcgatgctacacacgtatacatgtacgtcttcattttggccggcgctgaagtgctgacctctagtctaatcctgctcctgggcaacttcttttgcatccgcaaaaaacccaaagagccgcagcccgaggtggctgctgctgaggaagaaaaactgcacaaacctcctgcagattcaggtgtggatctgcgggaggttgagcatttcctgaaggccgagcccgagaaaaatggggaagttgtgcacacacctgagactagcgtc

SEQ ID NO: 33750 - DNA, 1395 bp, synthetic construct
  misc_feature 1..1395: note = Description of Artificial Sequence: Synthetic coding sequence
  source 1..1395: mol_type = other DNA
atgggcggagccgttgtggacgaaggaccaacgggagtgaaggctccggacggaggatgggggtgggctgtgctcttcggatgctttgtaattaccggatttagctacgcgttcccgaaggctgtctctgtgtttttcaaggaactcatccaggagtttggtatcggatactccgacactgcctggatctccagcattctgcttgccatgctgtacgggacgggacccctgtgcagtgtatgtgttaatagattcgggtgtagaccggtgatgttggtagggggattgttcgcctccctcggaatggtggccgcttcattctgcagaagcataatccaggtttacctcaccaccggagtgattaccggactgggactggccctcaactttcagccctcgctcatcatgctgaaccggtacttctccaaacgacgcccgatggctaacggcctcgctgcagccggctcgcccgttttcctctgtgccctcagccctctgggacaactgctgcaggatcggtacggatggcggggcgggttcctgatcctgggaggactgttgctgaattgctgtgtgtgcgccgcactcatgcgccctctggtggtgactgctcaacccggatcaggcccgccacgcccgtcaagacggctcctcgatctgtcggtgtttcgggatcgtggtttcgtcctctacgctgtcgcggcatcggtgatggtcctcgggctgttcgtgccgccggtgtttgtcgtgtcctacgcaaaggacctcggggtcccagacactaaggccgcgttcctcttgaccattctggggtttatcgatatcttcgcacgcccagcggcgggttttgtggcaggactcggaaaggtgaggccctatagcgtgtatttgttctcattctccatgttcttcaatggcttggcggacctggctggatccactgcgggggattacggcgggctggtggtgttttgcatcttctttggaatctcctacggcatggtgggagcccttcagttcgaggtgcttatggctatcgtcgggacccacaaattctcctctgccatcggtttggtgctgctgatggaggcggtcgcagtcttggtcggcccgccatcgggaggtaaactgcttgacgcgactcacgtgtacatgtacgtgttcatcctcgccggagccgaagttctgacctcctcattgatcttgcttctgggaaacttcttctgcatccggaagaaacctaaagaaccccaaccggaggtcgcggcggctgaagaggagaaactccataagccgccggcggatagcggagtggacctgagagaggtcgagcacttcctgaaggccgaaccagaaaagaacggagaagtggtgcacactccagaaaccagcgtg

SEQ ID NO: 33751 - DNA, 1395 bp, synthetic construct
  misc_feature 1..1395: note = Description of Artificial Sequence: Synthetic coding sequence
  source 1..1395: mol_type = other DNA
atgggcggagcggtggtggacgagggaccgacgggagttaaggcccctgacggcggatggggatgggccgtgcttttcggatgcttcgtgatcaccggcttttcgtacgcattccctaaggcagtgtccgtctttttcaaagagctgatccaggaatttggaatcggatactcagatactgcctggatttccagcatcctccttgcgatgctgtacggcaccgggccgctctgctccgtgtgtgtgaaccggtttggatgccgcccagtcatgcttgtaggaggactcttcgcatccctcggaatggtggccgcgtcattctgtcgctcaatcatccaggtgtacctgaccactggcgtcatcaccggactcggcctggccctcaattttcagccgagccttatcatgctcaaccggtatttctcgaagagacggcctatggcaaatggcttggctgccgccggttcgccggtgttcctgtgcgctcttagtccactgggacagctgctccaagaccgctacggctggcggggaggattcctgatcctgggaggacttctgctgaactgctgcgtgtgcgccgcgctcatgcgcccgctcgtggtgactgcgcaaccgggatcggggccacctcgaccgtcgagaaggctgctcgacctctcagttttccgtgatcgtgggttcgtgctgtacgctgtggccgcttccgtgatggtgcttggcctgttcgtgccgccggtgttcgtggtgagctacgccaaggatctgggtgtccccgacactaaggcggcgttcctgctgaccatactcggctttattgatatcttcgctaggcctgctgccggttttgtggctggcctcggaaaggtgcgcccgtacagcgtctacctgttctccttttcgatgtttttcaacgggctggccgacctggctggatcgaccgccggtgactacggcgggctcgtggtgttttgtatctttttcggaatctcatacgggatggtgggagcccttcaatttgaagtgcttatggcgatcgtgggaactcacaaattcagctccgccatcggactcgtgctgctgatggaggccgtggccgtgctggttggaccaccatcgggaggcaaactcctggacgcaactcacgtgtacatgtacgtgttcatcttggccggagccgaagtcctgacctcgtcactgattctcctcctgggaaatttcttctgtatccggaaaaaacctaaggagccccagcctgaagtggcggccgctgaagaagagaagctccataagccaccagcagactcaggagtagatctgcgggaagtggagcacttcctgaaggccgagccggagaaaaatggggaagtggtgcatacgcctgaaacctccgtt

SEQ ID NO: 33752 - DNA, 1395 bp, synthetic construct
  misc_feature 1..1395: note = Description of Artificial Sequence: Synthetic coding sequence
  source 1..1395: mol_type = other DNA
atgggaggtgcagtggtcgatgagggaccaactggagtcaaagccccagacggcggctggggttgggcggtgttgtttggctgttttgtgatcaccggtttctcatacgcattcccgaaggcagtcagtgtgtttttcaaagagctcattcaggagttcgggatcggttacagcgatacggcgtggatctcctcgattctcctcgccatgttgtacggaacgggaccgctgtgttcggtctgtgtgaatcgctttggctgtaggccagtgatgctggtgggaggtctttttgcatcgcttggcatggtcgcagcatccttttgtagatcgattattcaagtgtacctcaccactggtgtgattactggtctgggtctggcgctgaattttcagccatccctcattatgcttaaccgctatttctccaagagacgtccaatggcaaacggactcgcagcagctggaagccccgtctttctttgtgcactctcacctttgggacagcttctccaggatcggtacggttggaggggcggtttcttgattctgggcggattgcttcttaattgctgtgtgtgcgccgccctcatgcggccccttgtcgtgactgcacagccaggttctggtcctccccgcccatcgcgcagactcttggatctttcggtgtttcgggacagaggcttcgtgctgtacgccgttgcagcatcggtgatggtgctgggactctttgtgccgcccgtgtttgtggtttcatacgctaaggatctcggagtcccggacaccaaagcggctttccttcttaccatccttggtttcattgacatattcgctagacctgcagctggctttgtcgccggactgggaaaagtcagaccttactcggtctacctgttctccttttccatgtttttcaacggcctggcagatctggctggctccactgccggagattacggaggccttgtggtgttctgcatcttttttgggatctcgtacggtatggtcggcgcactgcaattcgaggtgcttatggctattgtaggaactcataagttttcgagcgctattggacttgtactgttgatggaggcagtggcggtcctggtgggaccacctagcggtggaaagctgctcgacgccacccatgtctacatgtacgtgtttatcttggctggagccgaagtgctgacctcctcccttattctgctgctgggcaactttttctgcattcggaagaagcctaaggaaccacagccggaagtcgcagctgcagaagaagaaaagctccataagcctccagcagactcaggagtggatctcagagaagtggagcattttcttaaggcagaacctgaaaagaacggggaagtggtgcacactcctgagacttcggtg

SEQ ID NO: 33753 - DNA, 1395 bp, synthetic construct
  misc_feature 1..1395: note = Description of Artificial Sequence: Synthetic coding sequence
  source 1..1395: mol_type = other DNA
atgggaggtgctgtggtcgatgaaggtcccaccggggtgaaggcccctgacgggggctgggggtgggctgtgctttttggttgttttgtgatcactggtttctcttacgccttccccaaagctgtgagcgtgtttttcaaggaattgatccaagaatttggcattggatatagcgacacagcctggatcagctccattctacttgcaatgctgtatggtacaggccccctgtgctccgtttgtgtgaaccgcttcggttgcaggcccgtcatgcttgtggggggactcttcgcctctctgggaatggtagctgcctcattttgcaggagtataatccaggtgtacctcactacaggcgtcattacagggctgggtctcgccctcaactttcagccaagcctgattatgctgaacaggtacttctccaagcgccgtccaatggctaacggcctggcagccgctgggtcaccggtttttctctgtgctctgagccccctcggccagctgctgcaggaccgttacggctggagaggaggctttcttatactgggcggtctgctcctcaattgttgtgtttgcgccgcactgatgaggcctctggtcgtgaccgcccagcccggctcaggcccgccgcggcctagtagaagattgctggatctgagtgtgttcagagaccggggattcgttctctacgctgttgcagcaagcgtcatggtgctgggattgtttgtaccacccgtgtttgttgtgtcatacgccaaagatctcggtgtgcccgataccaaagcagcttttctcctgactatcctgggatttatagacattttcgcccggccagctgccgggttcgtcgccggtctcggcaaagtcaggccctattctgtgtatttattctcattttcgatgttcttcaatggattagccgacctcgcagggtctactgctggagactacggggggctggtagtgttttgtattttctttggaatttcatatggcatggtcggggcactgcagttcgaggttcttatggccatagtcgggacgcataaatttagttcggctattggtctggtgcttttgatggaagcggtggccgttttggtgggaccaccgtctggaggcaagctgctagacgcaacccacgtgtatatgtatgtgttcatcctagctggtgcggaggtgctcacaagcagcctgatcctcctactcgggaacttcttctgtattcgcaaaaagcccaaggagccccagcccgaggtcgctgccgcagaggaggagaagttgcacaaacctccggctgattctggggtggacctgagggaggtagaacacttcctgaaggcggaacccgagaagaacggggaagtggtgcatacccctgagacgagcgtc

SEQ ID NO: 33754 - DNA, 1395 bp, synthetic construct
  misc_feature 1..1395: note = Description of Artificial Sequence: Synthetic coding sequence
  source 1..1395: mol_type = other DNA
atgggaggcgccgtggtggacgaaggacccaccggagtcaaggcgccggacgggggttggggctgggccgttctgttcggatgtttcgtcatcaccggattctcatatgcgttccctaaagcggtatccgtgttcttcaaagagctcattcaagagttcggtatcggctactcagataccgcttggatctctagcatcctcctggccatgctgtatggaactggtccgctgtgtagtgtgtgcgtgaataggttcggttgccggcctgtgatgctggtggggggactgttcgcttcactgggtatggtggccgcgtccttttgccggtcgattattcaggtctacctgactacgggggtgatcacgggactgggcctcgcactgaacttccaaccctcgctcatcatgctcaacagatacttctccaagaggcgcccgatggcaaacggactggctgccgcgggttcaccggtgtttctgtgtgccctgagcccgctcggacagctccttcaggaccggtacggttggcgcggcgggttcctgatcttgggagggctgctgcttaattgctgcgtttgcgcagccctgatgcgtcctctcgtcgtgaccgctcagcctggatcggggccgccaaggccgtcccggcgcctcctggacctgtcagtgttccgggacagaggattcgtcctgtacgccgtggctgcttctgtcatggtgctcggattgtttgtcccacccgtgtttgtcgtgagttacgcaaaggacctcggcgtcccagacacgaaagccgcatttttgcttaccatcttgggattcatcgatatctttgctcgcccagctgcgggatttgttgccggactggggaaagtgcgcccctactcggtctacctcttctccttcagcatgttctttaatgggctcgccgacctggcaggatcgaccgcgggagattacggaggtttggtggtgttttgcatcttcttcggaatttcgtacggaatggtgggcgccctgcagttcgaagtgctcatggcgattgtgggaactcacaagttcagttcagctatcggcttggtgcttctgatggaggctgtggcggtgctcgtcggtccaccttccgggggaaagctcctggatgcgacccacgtctacatgtacgtgttcatcctggccggcgccgaagtgctgacttcgtcccttatcttgctcctgggcaacttcttttgcattcggaagaagccaaaggaaccgcaaccggaggtggccgctgcggaagaggaaaagctccataaaccaccggccgattcgggagtggaccttcgggaagtggagcatttcctcaaagcggaaccggagaagaacggagaggtcgtacacaccccggaaacttcggtg

SEQ ID NO: 33755 - DNA, 1395 bp, synthetic construct
  misc_feature 1..1395: note = Description of Artificial Sequence: Synthetic coding sequence
  source 1..1395: mol_type = other DNA
atgggaggcgcagtcgtggatgaaggaccgactggggtcaaggccccagacggcggatggggttgggcagtcctgtttggatgttttgtgattactggtttttcctatgcattcccaaaagcagtgtcggtgttctttaaggaactcattcaagagtttggaatcggttactcggatactgcgtggatttcctcgatccttctggcgatgttgtacggtacgggccctctctgctctgtgtgtgtgaaccgatttggttgtaggcctgtcatgctggtgggaggtcttttcgcctctcttggtatggtggccgcctccttttgcagatccataattcaggtgtatctcactacgggggttattaccggattgggcctggcactgaacttccaaccatcgctcattatgctcaataggtacttctcgaagagacgaccaatggctaacgggcttgccgcggcagggtcacccgtgttcctgtgtgccctctcgccactgggacaactgctgcaggatagatacggttggcgaggcggatttctgattctggggggacttctgctgaactgttgtgtctgcgcggcactgatgcggccactggtggtcactgcacagcccggcagcggacctcccaggccttcccggagacttcttgacctcagcgtgttcagggataggggcttcgtgctttatgcagtcgccgcgtcggtcatggtgcttggcctgtttgtgccccctgtgttcgtggtgagctacgcaaaggatcttggcgtcccagataccaaggccgcatttctgttgaccattctggggtttatcgacatttttgcacgtccagcagcaggatttgtcgctggccttggaaaggttcggccctactccgtgtatctgttttcgttttcaatgttcttcaacgggttggcagatcttgccggatccaccgcaggtgattacggtggacttgtggttttctgtatcttttttggcatctcgtacggaatggtgggtgctttgcagtttgaggtactgatggctattgtgggaactcacaagttctcctccgcaatcggccttgtgcttctcatggaggcagtggcagtgcttgtgggaccgccatcgggaggaaaacttcttgacgcaacccatgtgtacatgtacgtgtttatactggcaggcgccgaggtgcttacgtcctcgctgatcctgcttctggggaatttcttctgtatcagaaagaagccaaaggaaccacaacctgaggtggcagctgctgaagaagaaaaactgcataagccgcctgcggattccggggtggacctgagagaagtggaacatttccttaaggcagaaccagagaagaatggtgaagtggtacatactcctgaaacgagcgtc

SEQ ID NO: 33756 - DNA, 1395 bp, synthetic construct
  misc_feature 1..1395: note = Description of Artificial Sequence: Synthetic coding sequence
  source 1..1395: mol_type = other DNA
atgggcggtgccgtggtcgatgaagggccgaccggggttaaggcccctgatgggggatggggttgggctgtgctgttcggctgcttcgtgatcactgggttcagctacgcgttcccgaaggctgtctccgttttcttcaaagagttgattcaggagtttgggattggttactcggacaccgcctggatctcgtccattctcttggcaatgctgtacggaacgggcccgctctgctccgtgtgcgtcaatcggtttggatgtcgaccggtgatgctggtcggaggcctcttcgcgtcactcggtatggtggcagcctccttctgccgctcaatcatccaggtgtacctcactactggagttattactggactcgggttggccctgaactttcaaccgagcctcatcatgctgaacagatacttttcaaagaggcgcccgatggccaacggactggcagccgcaggatcgccggtgttcctgtgcgcactgtccccgttgggtcaactcctccaggacagatacggatggagagggggattccttatcctgggaggccttctgctcaactgctgcgtgtgcgctgccctcatgcgcccacttgtagtgactgcacagcctggatcaggacctccacggccttcgcgcagactgctcgacctgtccgtctttagggatagaggatttgtgctgtacgcagtcgcggcttccgtgatggttcttgggctgttcgtgccacctgtgttcgtggtatcgtacgccaaggacctgggagtgccggacaccaaggcggccttcctgttgacgatcctgggctttatcgacatcttcgcgcgcccagcggccggcttcgtcgcaggcctgggtaaggtgcggccgtactcggtgtaccttttcagcttctcaatgtttttcaatggactggcggatctcgcgggcagcactgcaggggattacggagggctggtcgtgttctgcatcttttttggcatctcgtacggcatggtgggcgccctgcagttcgaggtgctgatggctatcgtgggaactcataagttctcctcggcaatcggcctggtgctgcttatggaggctgtggctgtgctggtcggacctccgtccggaggaaaactgctcgatgcaactcacgtctacatgtacgtgttcatcctggctggtgcggaagtgctgacctcgtccctgattctgctcctgggcaacttcttctgcatccgcaaaaagccgaaggagccccagccagaagtggccgctgccgaagaagaaaagctccataaaccaccggccgattcaggcgtcgacctgcgggaggtcgaacattttctgaaagcagaaccagaaaagaatggcgaagttgtgcacaccccggaaacgtccgtc

SEQ ID NO: 33757 - DNA, 1395 bp, synthetic construct
  misc_feature 1..1395: note = Description of Artificial Sequence: Synthetic coding sequence
  source 1..1395: mol_type = other DNA
atggggggagccgtcgtggacgaagggcccacgggcgtaaaagcacccgatgggggttgggggtgggccgttttgttcggctgtttcgtaattacgggctttagctatgcttttcccaaggcggtcagtgtgttcttcaaggagctgatccaggagtttgggatcggttactccgacacggcatggatttcgagcatcctcctggccatgctgtatggaacaggacctctttgctcagtctgtgtgaatcggttcggatgtcggcccgtgatgctcgtgggggggctctttgcttcactcggaatggtggctgcctccttttgccggtccatcatccaggtgtacctgactacaggcgtcattacaggattgggacttgcactcaactttcaaccatctctcatcatgttgaaccgatacttctctaaacggagaccgatggccaatgggctagcagccgcagggtcccctgtattcctctgcgccttgagccctttggggcagctactacaggatcgatacggctggcgaggggggttcctgatacttggcggactgctgcttaactgctgtgtctgtgctgctctgatgcggccactggtggtaactgcccaacctggctcaggaccaccccgtcctagccggcgccttcttgacctcagtgttttccgcgacaggggctttgttctctatgcggtcgcagcctccgttatggtcctggggctttttgtcccacctgtgttcgtagtcagctacgccaaggacctcggtgttccagacaccaaagctgcttttttgctaacgatcctcggtttcattgatatatttgctcgcccagccgccggtttcgtcgcggggttgggaaaggtgcgcccttactctgtgtatctgttttccttttcaatgttcttcaatggactggctgacctggccgggagcacagccggcgattatggtggacttgtagtgttctgcatcttttttgggattagctatggaatggtgggcgctttgcaattcgaggttctgatggcaattgttggaactcataaattttcctccgccatcggactcgtcttgctgatggaggctgtggcggtcctcgtgggccccccctccggcggcaagctgctcgatgccacccatgtgtatatgtacgtgtttattctcgccggagcggaagtcctcacatcttccctgatactgctcctcgggaacttcttttgtatcagaaagaagcctaaggaaccacagcctgaagttgccgctgcggaagaggagaaacttcacaagccaccagccgactccggagtggacttgagagaggttgaacatttccttaaagctgagccagagaagaatggagaggtggtgcatacaccagagaccagtgtc

SEQ ID NO: 33758 - DNA, 1395 bp, synthetic construct
  misc_feature 1..1395: note = Description of Artificial Sequence: Synthetic coding sequence
  source 1..1395: mol_type = other DNA
atgggcggggccgtggtcgatgagggaccaaccggagtcaaggcgcctgatggcggctggggctgggccgtgctgttcggatgtttcgtcatcactgggttcagctacgcatttccgaaggctgtgagcgtgttctttaaggagctcatccaggagttcggaattggttactcagacactgcttggatttcctcaatcctgctcgcaatgctttacggcactggaccactgtgctccgtctgtgtgaaccggtttggatgccggcctgttatgctggttggtggcctcttcgctagcttgggaatggtcgcggcttccttttgtcggtccatcatccaagtgtacctcactaccggcgtgataaccggcctgggcctggccctgaacttccagccgagcctgatcatgctcaatcggtacttttcgaagcggcggccgatggccaacggtctggcggcggctggctctccagtgttcctctgcgccctgagcccgttgggtcagctcctccaggacaggtacggttggagaggtggtttccttatcctgggaggcctgttgctgaactgctgtgtgtgcgccgcgctcatgaggcctctcgtcgttacggcacagccaggtagcggacctccacgcccgtccaggaggctgctggacctctcagtctttcgggaccggggctttgtgctgtacgccgtggcggcctcggtgatggtgcttggtctgttcgtgccgcccgtgtttgtggtatcgtacgctaaggatctgggagtgcctgacactaaggcggcgttcctgctgaccatccttggctttatcgacatctttgcccgcccggctgccgggtttgtggcaggattgggaaaggtgcggccctactccgtgtacctgttcagcttctcgatgttctttaatggtctggcggacctcgccgggtccaccgccggggattacggaggacttgtcgtgttttgcatcttctttgggatctcgtacggaatggtgggggcattgcaattcgaggtgctcatggcgattgtcggtactcataagttctccagcgcgatcggtctggtgctgctgatggaggcggtggctgtgttggtgggaccgccatcgggaggcaagctcctcgacgcgacccacgtgtacatgtacgtgttcatcctcgcgggagcagaggtgttgaccagctcgctgatccttctgctgggcaacttcttctgcatccgcaaaaaaccgaaagagcctcagcctgaggtggctgcagccgaagaagaaaagctgcacaagccaccagcagattccggcgtcgacctgcgtgaagtcgaacatttcctgaaagccgagccggagaagaacggggaagtggtgcacactccggaaacctccgtc

SEQ ID NO: 33759 - DNA, 1395 bp, synthetic construct
  misc_feature 1..1395: note = Description of Artificial Sequence: Synthetic coding sequence
  source 1..1395: mol_type = other DNA
atgggaggagctgtggtggacgaggggccgacgggcgtgaaagccccggatggtggatgggggtgggctgtcctgttcggttgcttcgttatcaccggctttagctacgcttttccgaaggcggtgtctgtgttctttaaggaactcatccaagaattcggaatcggctactcggatactgcctggatctcgagcatcttgctggctatgctctacggaactgggccgttgtgttcggtgtgtgtgaaccggttcggatgccggcctgtgatgctggtcgggggcctgtttgcgtccctcggaatggtggcagcgagcttctgtcggtccatcatccaggtgtacctcactaccggagttatcaccggacttgggctggccttgaatttccagccatccctgatcatgttgaatcgctactttagcaagcgccgcccgatggccaacgggctcgcagcagccggctcgcccgtgttcttgtgcgccctgtccccactgggacagctgttgcaggatagatacggctggcgcggaggatttctgatcttgggtggactgcttctgaactgttgcgtgtgcgcagccctgatgcgccccctggtggtgacggcccagccgggatccggtccgccaaggccgtccaggcgcctgcttgacctctccgtgttcagagatcggggattcgtgctctacgcggtggcagcctcggtcatggtgctgggactgttcgtcccgcccgtgttcgtggtgtcgtacgcgaaagacctcggtgtgccggataccaaggccgctttcctgctgactatcctggggtttatcgacatttttgctagacctgcggcgggtttcgtggctggactcggaaaagtcagaccgtactcagtgtatctctttagctttagcatgttcttcaacggtctggccgatttggctggctcaactgcgggagactacgggggactggtcgtgttctgcatcttcttcggtatttcgtacggtatggttggagccctgcaattcgaagtgctgatggccatcgtgggcacgcacaaattctcctctgcgatcgggttggtgctccttatggaggccgtcgctgtcctggttggcccaccgtcaggtggtaagctgcttgacgcgactcatgtctacatgtatgtgttcatcttggctggcgctgaggtcctcactagcagcctgattctgctgttgggaaatttcttttgtatccggaagaagccgaaggagccacaacctgaagtggccgcggccgaggaagaaaagctccacaaaccaccggcagactccggtgtcgacctccgagaggtcgagcatttccttaaggcggaaccagaaaagaacggagaggttgtgcacactcctgagactagcgtg

SEQ ID NO: 33760 - DNA, 1395 bp, synthetic construct
  misc_feature 1..1395: note = Description of Artificial Sequence: Synthetic coding sequence
  source 1..1395: mol_type = other DNA
atgggcggcgccgtcgtggatgaagggccgactggggtgaaagcgcccgacggtggctggggctgggcagtgcttttcgggtgctttgtgatcaccggattctcctatgcattccctaaggccgtgtccgtgtttttcaaggagcttatccaagaatttgggatcggctactcggataccgcctggatttcctcgatcctgctggccatgctgtacggtaccggaccgctgtgttcggtgtgtgtgaaccggttcggatgccgtccggtgatgttggtgggaggactgttcgcctcgctcgggatggtggccgcatcgttctgcaggtcaatcatccaggtctacctcactaccggcgtgattactggtttgggtcttgcactgaatttccagccttcactgatcatgctcaacagatacttcagtaagaggcgccctatggcgaatggcctcgcggccgcgggatcaccggtgtttctctgcgcgcttagccccctgggacagctcttgcaggataggtacgggtggagaggtggattcctcattctgggcggccttctgctgaactgctgcgtgtgcgcggccctgatgcgccccctcgtggtcaccgctcaaccaggatcgggccccccacgcccttcgcgccgactgctggatctttccgtgttccgcgacaggggattcgtgctgtacgccgtcgcggcgagcgtcatggtgctgggactttttgtgccgccggtgtttgtggtgtcgtacgctaaggacctgggcgtgccggacactaaggcggcctttctgctgaccattctcggtttcatcgatatcttcgcacgacctgccgcgggattcgtcgcaggattggggaaagtcagaccatactccgtgtacttgttctcattttccatgttcttcaacggcctcgctgacttggcggggtcgacggctggggactacggtggcctcgtcgtgttctgcatcttctttggaatttcgtacggtatggtcggcgctcttcagttcgaagttctcatggcaatcgtcggtacccacaaattctcgtccgcgatcggactggtcctgttgatggaagcggtcgctgtgctggtggggcctccatccggaggtaaactcctggacgctactcacgtttacatgtacgtgttcatcctggcgggagcggaagtgttgacgtcatcgctgatcctgctgctcggtaacttcttctgcattagaaaaaagccgaaagaaccgcaaccggaagtcgcagcggcggaggaagagaagttgcataagccaccggccgattccggcgtggatcttcgggaggtcgagcacttcctgaaagccgagccggagaagaacggagaagtcgttcatacccccgaaacctccgtg

SEQ ID NO: 33761 - DNA, 1395 bp, synthetic construct
  misc_feature 1..1395: note = Description of Artificial Sequence: Synthetic coding sequence
  source 1..1395: mol_type = other DNA
atgggaggagccgtcgtggacgagggtccgacgggcgtgaaagctccggatggcggttggggttgggccgtgctcttcggctgttttgtgattaccgggttctcgtacgcgttccccaaagcagtgtccgttttcttcaaggaactcatccaggaatttgggatcggctactcggacactgcgtggatctcgtcgattctgctggccatgctgtacggaactggccctctgtgttccgtttgcgtgaacaggttcggatgccggccagtgatgctcgtcggaggcctgttcgcctcgcttggaatggtcgcagcctcgttttgcagaagcatcatccaggtgtatcttaccaccggagttatcactggtctgggcctggccctcaacttccaaccgtcactgatcatgttgaatcgctacttcagcaaacggcggccgatggcaaatggactggccgccgccggaagccccgtctttctttgcgccctgagtccgttgggacagctgctgcaggacagatacggctggaggggaggctttttgatcctcggaggattgctgctgaattgctgcgtgtgtgctgcactgatgcggccgctggtcgtgactgcgcaaccgggatcgggtccgccgaggccatcgagacggctgctggatctcagcgtctttcgggacaggggattcgtcctctacgccgtggcagcatccgtcatggtgctgggcctttttgtccctccggtgttcgtggtgtcatatgccaaggatcttggagttcctgacactaaagccgccttcctgttgaccatcctgggcttcatcgatatcttcgccaggcctgctgcaggttttgtggccggactgggaaaggtgcgcccgtacagcgtgtaccttttctcattcagcatgttctttaacgggctcgctgacctggctggctccaccgcgggagattacggcgggctcgtggtgttctgcatcttcttcggaatctcttacggaatggtgggggccctccagttcgaagtgctcatggctatcgtgggcacccacaagttcagctcggctatcggtttggtgctgctgatggaagcagtagccgtgctggtcggcccaccctccggcggaaagctcctggacgcgactcacgtctacatgtacgtgttcatccttgcgggtgcggaagtgctcacgtcgtccctgatcctcctgctgggtaatttcttctgcatccgcaagaaacctaaggagccgcagccagaggtggcggccgccgaggaggagaaacttcacaagccaccagctgattccggggtggacctgcgcgaggtggagcacttcctcaaggccgaacccgagaaaaatggagaagtggtgcacactcctgagacttccgtg

SEQ ID NO: 33762 - DNA, 1395 bp, synthetic construct
  misc_feature 1..1395: note = Description of Artificial Sequence: Synthetic coding sequence
  source 1..1395: mol_type = other DNA
atgggtggagcagtggtggatgaaggtccaactggcgtgaaggctcccgacggcggttggggatgggcagtgctctttggctgcttcgtgattaccgggttctcatacgcatttccaaaggctgtgtcggtgttctttaaggaacttatacaagagtttggaattgggtattcagatactgcgtggatttcctccattctcctcgcaatgctttacggcaccgggcctctttgtagtgtctgcgtgaatcgatttggctgtagacctgtgatgctcgtgggcggtctttttgcatcactcggaatggtcgcggcatccttttgcagaagcatcattcaagtctaccttacgaccggcgtgatcaccggactgggtctggcacttaacttccaaccttcgctgataatgctgaaccgctactttagcaagcgaaggccgatggccaacggactcgcggcagccggatcccctgtattcttgtgtgcactttcgccactcggccagctccttcaagacaggtacggatggagagggggctttctcattctgggaggcctcctgttgaattgttgtgtgtgtgccgcactcatgcgccctttggttgttaccgctcagccaggtagcggaccaccaagaccttcgaggagactccttgatctctcggtgttccgggatcggggattcgtgctttacgccgttgcagcatcagtgatggtgttgggactgttcgtgcccccggtttttgtggtgagctacgcaaaggatctcggagtccctgacaccaaagcagcgtttctcttgactatcctgggatttatcgacatctttgcccgtcctgccgcaggctttgtagcaggcctgggaaaggtcagaccttactcggtgtatcttttctcgtttagcatgttctttaatgggctggcagacctggcaggtagcaccgcgggcgactacggaggtcttgtggtcttttgcatcttttttggtatatcgtacggtatggtaggagcactccagtttgaagtccttatggccattgtgggaactcacaagttcagctcagcaatcggactggtccttttgatggaagccgtggcggtccttgtggggccaccgtccgggggaaaattgctggatgccactcatgtctacatgtacgtattcattcttgcaggagctgaagttttgactagctccctcattttgctgcttggtaacttcttctgtataaggaagaagcccaaggaaccacagccggaggttgcagccgctgaagaagagaaacttcataaaccacccgccgattccggggtggatttgcgggaggtcgagcactttcttaaagcagaaccagagaagaacggggaagtggtgcatacccctgaaacgagcgtg

SEQ ID NO: 33763 - DNA, 1395 bp, synthetic construct
  misc_feature 1..1395: note = Description of Artificial Sequence: Synthetic coding sequence
  source 1..1395: mol_type = other DNA
atgggaggggctgtcgtcgacgaagggccaaccggcgtgaaggctcccgacggcggatgggggtgggcagtactgttcggctgctttgtcatcactgggttttcatacgcctttcctaaagccgtcagcgtgttctttaaggaactgatacaagaattcggaatcggttatagcgatacagcatggatatccagtatcctgctggccatgctctatgggaccggaccactctgttcagtttgcgtcaatagatttggatgccgacctgtgatgctggtcggcggtctcttcgcctccctgggaatggtagccgctagtttttgtcggtccatcatccaagtgtacctgaccacaggcgttattaccggacttggccttgccctgaatttccagccgtcgttgattatgctcaataggtatttttcaaaacggcgccccatggcaaatgggctagcagctgcgggatctcctgtttttctgtgtgctctgagccctctcgggcagctgctgcaggacaggtacgggtggcggggcggcttccttatcctggggggtctcctgctgaactgttgcgtgtgtgcggctctcatgcggcctctggttgtgacggctcaacccggctcaggccctcctcggccgagcagacggttgttggacctgtccgtgtttcgggaccgggggttcgtgctttatgctgtggctgcatccgtaatggttctgggtctgtttgtcccgcctgtgtttgtagtaagctatgccaaggacctgggcgtgcccgatacaaaagcagccttcttgctgacaatcctggggttcatcgacatcttcgcccggccggccgctggattcgtggcaggcctggggaaggttcgcccatactccgtgtaccttttttctttttctatgttctttaatggcctggctgatctcgccgggtctacagcgggcgactacgggggtcttgttgtattctgcattttctttggcatatcttacggaatggtaggcgccctacagtttgaagtattgatggctatcgtcggtactcacaaattcagtagcgctatcggactggtcctgctgatggaagcagtggccgtgttggtcggcccgccttccggagggaagcttttggatgctacccatgtctatatgtacgtgtttattctggcaggcgccgaagttctaacttctagcctgatcctcctgctgggtaactttttttgcattagaaagaaaccgaaagagccccagccagaagtggcggcggctgaagaagaaaaactccataagccgccagcagactcaggcgtggatctaagggaagtggaacacttcctgaaggcggagcctgagaagaatggcgaggttgtgcatacgccagaaactagcgtg

SEQ ID NO: 33764 - DNA, 1395 bp, synthetic construct
  misc_feature 1..1395: note = Description of Artificial Sequence: Synthetic coding sequence
  source 1..1395: mol_type = other DNA
atgggtggcgcagtggtggatgaaggacccactggtgtgaaggcgcctgacggtggttggggttgggcagtactttttggatgtttcgtgatcactggattctcttatgcgtttccaaaagctgtgtccgtgttctttaaggaactgattcaagaatttggaattggctactcggacaccgcatggatttcttctatcttgcttgcaatgctctacggaaccggtcctctctgctcggtgtgcgtgaatagattcggctgccgcccagtgatgctcgtcggaggactgttcgcatcactgggtatggtggcagcatcattttgtcggagcattatccaggtctaccttaccaccggagtgatcactggcctcggtcttgccctcaactttcaaccatctcttatcatgctcaatagatacttttccaaacgtagacctatggcaaacggactcgccgcagctggatcaccagtctttctgtgcgcgctgtcgccactgggtcaacttcttcaagacagatatggctggaggggcggctttctcatcctgggcggacttcttcttaactgttgtgtgtgtgcggccctcatgcggcctctggtcgtgaccgcacagccagggtccggccctccaagaccatcccgccggttgcttgatttgtccgtgttccgcgatcggggatttgtgctttacgcagtcgcggcatccgtcatggtgcttggactgtttgtccctcccgtttttgtggtgtcctacgccaaggaccttggggtgccggataccaaagccgcattcctgcttactattctcgggtttattgacatttttgcaaggccagccgcaggatttgtggcgggtctgggtaaggttcgaccttactcggtgtacctcttttcgttctcgatgttcttcaacggtcttgcagatctcgctggctccaccgcaggagattacggtggtctggtggtcttttgtatattcttcgggatatcatacggtatggtgggtgcacttcagtttgaggtgctcatggccattgtcggtactcataagtttagctcagcgattggactggttcttctcatggaagccgtggcagtcttggtcgggcccccgtccggaggtaaactccttgatgccacgcacgtctacatgtacgtgtttatactcgcgggggcagaagtgctgacctctagcctcatcctcctccttggcaactttttctgtattagaaaaaagccgaaggagccccagcccgaagtcgctgcggcggaggaggaaaagttgcacaagcctccagccgactctggcgtggatcttcgtgaggtggaacactttctcaaggccgaacccgaaaagaatggtgaagtggttcatacgcctgagactagcgtc

SEQ ID NO: 33765 - DNA, 1395 bp, synthetic construct
  misc_feature 1..1395: note = Description of Artificial Sequence: Synthetic coding sequence
  source 1..1395: mol_type = other DNA
atgggaggcgctgttgttgacgagggacccacaggcgtgaaagcacccgacgggggatggggatgggccgtgctcttcggatgctttgtgattacagggttctcttacgcattccccaaggctgtcagtgtttttttcaaagagttgatccaggagtttgggatcggatactcagacactgcatggatttctagtattctgctcgctatgctttacggcacgggaccgctgtgctctgtctgcgtgaatcgctttggctgtaggcctgtgatgctggtgggaggcctatttgcctccctgggtatggtcgcagcttcattttgccggtcaattatccaggtataccttaccacgggggtcatcactggtcttggactggccctgaattttcaaccatccctgataatgctcaataggtacttctccaagcgccgtcccatggcaaacggcttggcggcagcgggatcccctgtcttcctctgtgccctctcgccacttgggcaactgctgcaagacaggtacgggtggaggggggggttcctgatcctcggagggctgcttctgaattgctgtgtttgtgccgccctgatgagaccactcgttgtaaccgcacaacctggtagtggaccacctaggccttccagaagacttcttgacctctctgtgtttagagaccgtgggttcgtgctgtacgcggtggcagcatcagtcatggtgctgggcctgttcgtccctcccgtcttcgtggtatcgtacgccaaagacctgggggtccccgacactaaggccgccttcctcctgaccattctgggcttcatcgacatttttgccaggcctgccgcaggctttgtggctgggctcggaaaagtcaggccctactcagtgtatctcttctctttctctatgtttttcaacggcctcgccgacctcgcgggctctactgccggtgattacggcggactggtcgtgttctgcattttttttggcatttcatacggaatggtaggggccctccaattcgaagtgctgatggccatcgtagggacccataagttctccagtgcaattggcctggttcttctcatggaggcggtcgctgtgttagtgggacctccttctggaggtaagctactcgatgccactcacgtgtacatgtacgtttttatactggccggcgctgaggtgcttacatctagcctcatactgctcctggggaactttttttgtatcagaaaaaagcctaaggagcctcagcctgaggtcgcagcagcagaggaggaaaaactacataagccgcccgccgacagcggggtggacctgagggaagtggaacactttttaaaagcagagcctgagaaaaatggggaggtcgtccatacccccgaaacatctgtc

SEQ ID NO: 33766 - DNA, 1395 bp, synthetic construct
  misc_feature 1..1395: note = Description of Artificial Sequence: Synthetic coding sequence
  source 1..1395: mol_type = other DNA
atgggaggagcagtcgtcgacgaagggccaactggtgtgaaggcccctgatggcgggtggggatgggccgtgctctttgggtgcttcgtgatcactgggttctcctacgctttccccaaagcagtctcagtgttcttcaaggaactcatccaagaatttggaatcgggtactcggatactgcatggatttcgtcaatcttgctggccatgctgtacggcaccggaccactgtgctcagtttgcgtgaaccgctttggatgcagaccggtcatgctggtcggcggattgttcgccagcttgggaatggtggccgcctcattttgccggtcgattatccaagtgtacctcactaccggagtgattaccggtctggggctcgcgctgaatttccaaccgtccctgatcatgttgaaccgctacttctcgaagcgccggccgatggccaacgggctggcagccgccggatcgccagtgtttttgtgcgctctgtcaccactcggacagctgctccaggatcgctacggttggcggggaggattcctgatactgggcggattgctgcttaattgctgtgtgtgcgccgccctgatgaggcctctggtggtgaccgctcagcctggatcgggtcctccaaggccttcaaggcggttgctggatctctccgtgttccgggaccgcggattcgtgctttacgccgtggctgcctcggtcatggtgctggggctttttgtgccgccagttttcgtcgtcagctacgctaaagatttgggtgtgccagacaccaaggccgccttcctgctcactatcctcggcttcatcgacattttcgcccggccagcggcgggatttgtcgccggactgggtaaggtgcggccctactcggtctacctgttttccttttccatgtttttcaacggactggctgacctcgctgggagcaccgcgggagactacggagggttggtggtgttctgcatctttttcggcatctcgtacggaatggttggagcccttcagttcgaagtccttatggcaatcgtcggtacccacaaattctcctcggcgatcgggttggtgttgctgatggaagccgtcgcagtgctggtgggaccaccgtcgggcgggaagctgctggacgcgacccatgtctatatgtacgtgttcattctggctggcgcggaagtgctcacctccagtttgatcctgctgctggggaactttttctgcattcgcaaaaagcctaaagaacctcagccggaagtcgctgcggccgaggaggaaaagctgcacaaacctccggccgattccggagtggatctgcgggaggtcgaacatttcctcaaggcggagccggaaaagaatggagaggtggttcacacgccggaaacttctgtg

SEQ ID NO: 33767 - DNA, 1395 bp, synthetic construct
  misc_feature 1..1395: note = Description of Artificial Sequence: Synthetic coding sequence
  source 1..1395: mol_type = other DNA
atggggggagctgttgtggacgaagggccaacaggggtcaaggccccagatggtgggtggggttgggctgtgttgttcggttgtttcgttataaccggtttcagttatgcatttcccaaggccgtgagcgtcttctttaaagagttaatccaagagtttggtataggttactccgatactgcttggatcagcagtattttgctcgcaatgttatacggtacaggtcctctttgctcagtttgtgtcaatcgcttcggttgtagaccagttatgctcgttggtggacttttcgcaagtcttgggatggttgccgcttctttctgtaggagcataatacaggtttacctaaccaccggtgttataactggccttggactagctttgaatttccaacctagtcttataatgcttaaccggtactttagcaagaggcgacctatggccaacggattggcagcggccggtagccctgttttcctttgcgccttatcccctttaggtcagctcctgcaagacaggtatggctggcgtggtggatttctgatcctgggtggtttattacttaattgttgcgtctgtgctgctttgatgcgccccttggtggttaccgcccagcctggttctggcccaccaaggcccagccggcgtctgctcgatctttcagtgttccgagatcgcggtttcgtcctttatgccgttgcagcgtcagtgatggtgttgggacttttcgttccaccggtgtttgttgttagctacgcaaaggacctgggagtgcccgatactaaggcggcttttttgttaacaatcctcggatttatcgatatatttgctaggcctgccgctggtttcgtagccgggcttggtaaagttagaccttattctgtgtatcttttctccttctctatgttttttaatggattggcagatttggctggctctactgcaggagattatggaggattagtcgtcttctgtattttctttggtatctcctacggtatggtcggagctctccaattcgaagttttgatggctatcgtaggtactcataagttttcgtcggccattggactggtgcttctgatggaggctgtagcagtactcgttggtcccccttcgggcggtaagttgttagacgcgacacatgtttacatgtatgtgttcattttagcaggtgccgaggtgctaacttcttcactaattttattgcttggtaactttttctgcattcgaaagaaacccaaggagccccaacccgaagtagccgcggccgaggaggaaaagcttcataaaccacctgctgattcgggtgttgacttaagagaggtggaacattttctcaaggccgagcccgaaaaaaacggcgaggtggttcatacgccagagacctcagtt

SEQ ID NO: 33768 - DNA, 1395 bp, synthetic construct
  misc_feature 1..1395: note = Description of Artificial Sequence: Synthetic coding sequence
  source 1..1395: mol_type = other DNA
atgggtggtgccgtggttgacgagggcccgactggcgtgaaagccccagacggcggatggggctgggccgtcctgttcggatgcttcgtgattactggtttctcgtacgcattcccgaaggccgtgtccgtgttcttcaaagagctgatccaggaattcggcatcggatactctgataccgcatggattagctcgatcttgctggccatgctgtacggaaccgggccgctttgctcggtgtgcgtgaatcggttcggatgccggccggtgatgctggtcggaggactgtttgcctcgctgggcatggtcgctgcatccttctgccgctcaatcatccaagtgtacctgactactggcgtcatcaccggactcggattggcgctcaactttcaaccgtcattgatcatgctgaaccggtacttctcgaagagacggccgatggctaacggactggcggctgcgggatcgccggtgttcctctgcgctctttcgccgctgggacagctgctgcaggaccgctacgggtggagagggggattcctgatcctcggaggactgctcctgaattgctgcgtgtgcgctgccctgatgaggccactggtcgtgaccgctcaaccgggatcaggacctcccagaccgtcccggcgcctgctggacctgagcgtgtttcgagacagaggttttgtcctctacgccgtcgccgccagcgtgatggtgctgggactcttcgtgcccccagtgttcgtggtcagctacgccaaggatctgggagtgccggatacgaaggcggcatttctcctcaccatcctgggatttatcgatatcttcgcgcgcccggccgccggtttcgtcgctggactcggaaaagtgcgcccctactcggtgtacctgttctcattctctatgtttttcaatggactcgccgacctggctggctccaccgccggcgattacggtggacttgtggtgttctgcattttctttggcatcagctacggaatggtgggagctctgcaattcgaggtcttgatggcaatcgtgggtactcataagttttcatcggcgatcggactcgtgctcctgatggaagccgtggccgtgctggttggacccccgtcaggagggaagttgctcgacgcaactcacgtgtacatgtacgtgttcatcctcgcaggcgccgaggtgctcacctccagcttgattctgctgctcggaaacttcttctgcatccgcaaaaagccgaaggagccacagcccgaagtggctgcggctgaggaagagaagctgcataagccgccggccgactcgggagtggacttgagggaagtggaacatttcttgaaagcggagccggaaaagaacggagaggtggtgcacaccccggaaacttcagtg

SEQ ID NO: 33769 - DNA, 1395 bp, synthetic construct
  misc_feature 1..1395: note = Description of Artificial Sequence: Synthetic coding sequence
  source 1..1395: mol_type = other DNA
atgggaggagctgtggtcgacgagggaccgactggagtcaaggccccggacggtggctggggatgggctgtcctgttcggatgtttcgtcatcactggcttttcctacgcatttccgaaggctgtgtccgtgttcttcaaggagctcatccaagagtttgggatcggctactcggacaccgcgtggatcagcagcatccttctggccatgctctatggcacgggcccgctgtgctccgtgtgtgtgaaccgatttggttgtagaccggtcatgcttgtgggaggactcttcgcctcgctgggaatggtcgcggcgtcattttgcagatctatcatccaggtgtacctcaccacgggagtcatcaccggcctcggactggccctcaatttccaaccatcactgatcatgctcaataggtacttttcaaagcggcgccctatggccaacgggctcgcggccgcgggctcacctgtgttcctttgcgccttgagcccactggggcagttgctccaggaccgctacggatggcgcggtggattccttattctcggaggtctgcttctcaattgctgcgtgtgtgcagcacttatgcggccactggttgtcaccgcccaacctggatcgggacctccacgaccatcacggcgcctcctggaccttagcgtgttcagggatcgcgggttcgtgctgtacgcggtggccgcctcagtgatggtgctgggcttgttcgtccccccggtctttgtggttagctacgccaaggacctgggtgttccagacaccaaggccgcattcctgctcactatcctggggtttatcgatatctttgcacggcctgccgcggggtttgtggccgggctcggcaaggtgcgcccttacagcgtgtacctgttttcgttctcgatgttcttcaacggacttgccgacctggccggaagcaccgcaggggactacggaggacttgttgtgttctgcatcttctttggcatctcgtatggcatggtgggagcactgcagttcgaggtgctgatggcgatcgtgggcacccacaagttttcgtcagccattggcctggtgttgctgatggaagctgttgccgtgctcgtgggcccgccgagcgggggaaagttgctggatgctactcatgtgtacatgtacgtgttcatcctggccggagcagaagtgctgactagctccctgatcctgctgctcggaaacttcttctgtatccgcaagaaaccgaaggagccccagccggaagtggccgcggcagaggaagagaagttgcataagcctccggcggactcgggcgtggatctgagggaagtggaacacttcttgaaagcggagccggagaagaacggagaagtggtccacaccccggagacttcggtc

SEQ ID NO: 33770 - DNA, 1395 bp, synthetic construct
  misc_feature 1..1395: note = Description of Artificial Sequence: Synthetic coding sequence
  source 1..1395: mol_type = other DNA
atgggcggtgctgtggtggatgaaggccccactggtgtgaaggcccccgatggcggatggggttgggccgtgctgtttgggtgttttgtcatcactggcttttcctacgcattcccaaaagctgtttcagttttctttaaagaactcatccaagagtttggcattggatactcagatacagcctggatttcctccattctactcgcaatgctgtacggaaccggtcctttgtgcagtgtctgtgtgaatcgatttggctgcagacccgtgatgctggtgggaggattatttgcctccctgggcatggtcgcagcctcattctgcaggtctatcattcaggtgtacctgactaccggggtgataaccggcttaggcctggctttgaattttcagccttccctgattatgctcaatcggtatttttccaagagaagacctatggccaatggcctagcagctgccggctctccagtctttctctgtgccctgtctccactgggccagctgctgcaggaccgatacggttggcggggcggtttcctcattttagggggactgctgctgaattgctgtgtgtgcgctgccctcatgaggcccctggtggttacagctcagccagggtccgggccacctaggccttcccgtagattgttagatctctccgtgttccgggatcgcggcttcgtgctgtacgcggtggctgcgagcgtcatggtcctaggactatttgttccacccgtgttcgtagtgtcgtacgctaaagacctaggagtccctgacacaaaggccgcattcctactgacaatcctgggattcattgatatcttcgcacgacccgcagccggcttcgttgcagggttaggaaaggtgcggccatactccgtgtacctgttctcattctctatgttctttaatgggctggctgatttggcaggctctacagctggcgattatgggggccttgtggttttttgcatcttcttcggaatatcttacggaatggtgggcgccctgcaatttgaagtgctcatggctatcgttggcacacacaagttctccagcgccattggcctggtcctcctgatggaagcagtcgctgtcctggtcggacccccttctggcggtaaactgctggacgcaactcacgtttatatgtatgtgttcatcttggcgggtgccgaggttttgaccagctccctgatcttgctcctcggaaactttttctgcattcggaagaagccaaaagaaccccaacctgaggtggccgctgcagaagaggagaagttgcataaaccgcctgccgatagtggggtcgatctgcgggaggtggaacactttcttaaggctgagccagagaagaacggagaggtggtgcacacccccgaaactagcgtg

SEQ ID NO: 33771 - DNA, 1395 bp, synthetic construct
  misc_feature 1..1395: note = Description of Artificial Sequence: Synthetic coding sequence
  source 1..1395: mol_type = other DNA
atggggggagcagtcgtggatgaaggcccgaccggcgtcaaggccccggacggcgggtggggatgggccgtcttgttcgggtgttttgtgattaccggtttttcgtacgcattcccgaaggccgtatcagttttcttcaaggagctgatccaggagtttggaatcggatactccgacaccgcttggatttcgagcatcctgctcgccatgctgtacggtaccggaccgctgtgctccgtgtgcgtgaaccgcttcgggtgccgccccgtcatgctggtgggcggcctgttcgcctccctgggcatggttgctgctagcttctgtcggagcatcatccaggtgtatttgactactggagtcatcactggactcggcttggcccttaatttccagccaagcctcataatgctgaacagatacttctccaagagaaggccgatggcaaatggattggcagccgccggctcacccgtgttcctgtgcgctctttcgcctctcgggcaactccttcaggaccgctacggatggcgcggaggattcctgatcctgggtggactcctcctcaactgctgtgtgtgcgccgcgctgatgaggccgctggtggtgaccgctcaaccaggatccggacctccacggcctagcagacgcctgttggacctgagcgtgtttcgggatagaggttttgtgctttacgcggtcgcggcatcagtgatggtgctggggctgtttgtgccgcctgtgtttgtggtcagctacgccaaggatctcggcgtgccggatactaaggctgcgttcttgctgaccatcctgggatttatcgacatcttcgctcggccagcggcaggctttgtggccggactgggtaaagtgcggccgtattcggtgtacctcttctccttctccatgttcttcaacgggctcgcggacctcgctggttctactgccggcgattacggtggactggtcgtgttctgcatcttcttcggaatctcgtacggcatggtgggggcactgcagttcgaggtgcttatggcgattgtgggaacgcataagttttcatccgccatcggactcgtgctgctcatggaagccgtcgcggtcctggttggaccaccttcgggaggcaagctcctcgacgcaacccacgtctacatgtacgttttcattctggccggagccgaagtccttacctcgtcactcatcctgctgctgggaaacttcttctgcatccgcaaaaaacccaaagaaccacaaccggaagtggcagcggcggaggaagagaagctgcacaagccgcctgcggatagtggagtggacctgcgagaggtcgaacatttcctgaaagccgagccagaaaagaatggagaagtcgtgcacacgcccgagacttcggtg

SEQ ID NO: 33772 - DNA, 1395 bp, synthetic construct
  misc_feature 1..1395: note = Description of Artificial Sequence: Synthetic coding sequence
  source 1..1395: mol_type = other DNA
atgggaggagctgtcgttgatgaagggcctactggagtgaaagcccccgatgggggatgggggtgggccgtactattcggatgcttcgtcattacagggttctcttacgcttttcccaaagctgtgagtgtgttctttaaagaactaatccaggaattcggaattgggtattctgacacagcatggatatcatccattcttctggcgatgctctacggaactgggcctctatgctccgtgtgcgtcaaccggttcgggtgcaggcccgtaatgttagttggaggattatttgcttcacttgggatggtagcagctagtttctgtcgctctatcatacaggtttatctgactacaggggtcattacagggcttggactcgctctcaatttccagcccagtctcatcatgctcaataggtatttctctaaaagacggcctatggctaatggactagccgcagccggatcacccgttttcctctgtgccttgtcacccctcggacagttactgcaggatcggtatgggtggagaggaggattcctcatcttaggagggctgctcttaaactgctgcgtgtgtgccgcactcatgagaccactggtagttactgcccagcccgggtcaggaccccctcgcccttcccggcggttgctggatctctcagtttttcgagatagaggattcgtcctctacgctgtggccgcctccgttatggttctgggacttttcgtgcctcccgtgtttgtggtctcttatgctaaagacctcggagtgcccgatactaaggccgctttcctcctcactatcttgggattcatcgatattttcgcccggcccgctgcgggatttgtggctgggctcggaaaagtgcgaccttattcagtatatctgttttcattttccatgttttttaatgggctcgcagatcttgccggatctacagcaggagactatggagggttggtcgtattctgtatcttttttgggatatcctacggaatggttggggctcttcagtttgaagtgctgatggcaattgtaggaactcataagttttcctcagccattggacttgtattattaatggaggccgttgctgtcttagtgggacccccttcaggaggaaaacttctcgatgcgactcatgtctatatgtatgtctttatacttgccggagctgaagtgttgacatcatctctcatcctgctcctcgggaattttttctgtattaggaagaaacctaaagaaccacagcccgaagtggccgctgctgaggaagagaaattacataaaccccccgctgactctggagtggatttaagggaagtcgaacattttctcaaagctgaacctgaaaaaaatggagaagtggtccatactcctgaaacatctgtc

SEQ ID NO: 33773 - DNA, 1395 bp, synthetic construct
  misc_feature 1..1395: note = Description of Artificial Sequence: Synthetic coding sequence
  source 1..1395: mol_type = other DNA
atgggcggcgcagttgtggacgagggacccaccggagtgaaagcccccgacggaggttggggttgggctgtcctgttcggctgttttgtcatcacaggcttcagctacgcttttcccaaggccgtctccgttttctttaaggaactgatacaagagtttggaatcggatactctgacacagcctggatcagctccatcctcctggccatgttgtacggaactggccctctgtgcagcgtgtgtgttaatcgctttggatgtaggccagtcatgttggttggaggattgtttgcatcactcggtatggtcgccgcttccttttgccgttccatcatccaggtttacctcactactggagtgattaccggtctgggtttggccctgaatttccagccctccctgatcatgcttaatcgctacttcagcaagaggagaccaatggctaacggtttggctgccgctggttcccccgtctttctctgtgcactttctcctttgggccaactgctccaggatcgctacggctggagaggcggttttctcattctgggaggtctcttgttgaactgttgcgtgtgtgcagccttgatgcgtcctctggtggtgaccgctcagcccggaagcggaccaccacgccccagccgtcgcttgcttgatttgagtgtttttcgcgaccgcggcttcgtgctctacgcagtggcagcttctgttatggtgttgggcctgttcgttccccctgtattcgttgtttcttacgccaaggatttgggagtccccgacacaaaagccgccttcctgctgacaatcttgggtttcatagatatttttgcacgcccagcagccggctttgtggccggcctcggtaaggtgaggccctatagcgtttaccttttctctttcagcatgttttttaatggcctcgccgatctggccggttccaccgcaggtgattatggaggtctggtcgtgttctgtatcttttttggcatctcctatggcatggtaggtgcattgcagttcgaagttctgatggcaatcgttggtactcacaagttctcctctgctatcggtctggtccttctgatggaggccgtcgccgtgctggtcggcccaccctccggtggcaagctgttggacgccacacatgtgtatatgtacgtcttcatcctggctggagccgaggtgctcacttcttcattgatactgcttctgggcaacttcttctgtataaggaaaaagccaaaagagccccaacctgaagtggctgccgctgaggaagagaagcttcataagccccctgccgactccggcgttgacttgcgcgaggtagagcacttcctgaaagcagagccagagaagaacggagaggtcgtacacacacctgaaacctctgtg

SEQ ID NO: 33774 - DNA, 1395 bp, synthetic construct
  misc_feature 1..1395: note = Description of Artificial Sequence: Synthetic coding sequence
  source 1..1395: mol_type = other DNA
atgggtggcgctgttgtcgacgagggcccaaccggagtgaaggcgcctgatggtggatggggttgggctgtgcttttcggttgcttcgtgatcactggattcagctacgccttcccaaaagctgtgtctgtgttttttaaagaacttattcaagagtttggaatcggctacagcgatactgcatggatatcttcaatcttgctggcaatgctttacggaacaggtcctctttgcagtgtttgcgtcaataggtttggctgcagaccggtaatgctggtaggcggcctcttcgcttctttgggaatggtcgctgcaagtttctgtagatcaatcatacaggtgtatctgaccactggagtgatcaccggcctcggcctggctctgaattttcagccttctctcataatgctgaataggtatttctcaaagaggagacctatggcaaatggactggctgccgctggatcaccagtgttcctctgtgctctcagtccgctcggacagcttttgcaggacaggtacggctggaggggtggtttccttatcctcggaggtctcctgctgaactgttgcgtctgtgctgccttgatgaggcctttggtagtcaccgcccagccaggctcaggacctccacgcccaagtaggcgccttctggacctcagtgtgtttagagatagaggcttcgtgctctacgccgtcgctgcctctgtgatggtcttgggactgttcgttccccctgttttcgtggtttcttacgcgaaggatctcggagtacccgatacaaaagccgccttcctcctcacaatcctcggctttattgacatctttgccaggcccgccgcaggattcgttgctggactcggcaaggttagaccgtactccgtataccttttttcattttcaatgttctttaacggactcgctgacctggccggttctaccgctggtgactacggtggtctcgtggtgttctgcatctttttcggaatctcttatggcatggtaggtgccctccagtttgaagttttgatggcgatcgttggtacacacaagttttcttcagcaatcggcctggtgctcctcatggaagctgtcgctgtcttggttggacccccgtccggaggaaagttgctcgatgccactcacgtgtacatgtatgtattcattttggctggtgctgaggtcctgacatcctctcttatcctccttcttggcaacttcttctgcatcaggaaaaagccgaaagagccacaaccagaagtagctgcagccgaggaggaaaaactgcataaacctcccgctgattctggcgtggatctgcgcgaagttgagcactttttgaaggctgagcctgaaaagaacggcgaagtggttcatactccagagacatcagtg

SEQ ID NO: 33775 - DNA, 1395 bp, synthetic construct; identical to SEQ ID NO: 33747
  misc_feature 1..1395: note = Description of Artificial Sequence: Synthetic coding sequence
  source 1..1395: mol_type = other DNA

SEQ ID NO: 33776 - DNA, 1395 bp, synthetic construct
  misc_feature 1..1395: note = Description of Artificial Sequence: Synthetic coding sequence
  source 1..1395: mol_type = other DNA
atgggcggagctgttgtcgatgaaggacctactggggtcaaagcgcctgacggtggatggggatgggcagtgctgtttggctgctttgtgattacgggtttctcctacgcgtttccaaaggccgtctcggtattctttaaggaacttattcaggagtttggaattggatactcagacactgcatggatttcctccatactgcttgctatgctttacggaactggccctctgtgttccgtgtgtgtgaatagatttggctgtcgtcctgtcatgctggtcggtggactgtttgccagcctgggcatggtggccgcctcattttgtcgttcgattattcaagtgtacctcaccactggggtgattactggactcggactggcccttaactttcaaccatcactcatcatgctgaatagatacttttcgaagagacggccaatggcaaacggtctggctgcagcgggctcccctgtattcctttgtgccctgtcgcccctgggacaacttcttcaagataggtacggttggcgcggtggttttctgatcctgggaggccttttgctgaactgttgcgtgtgtgcagcactgatgcgaccgcttgtggtgaccgcacagcctgggtccggacctccacgcccctcaagacgtctccttgatctgagcgtgttccgcgacagaggttttgtgctgtacgccgtggcggcctcggtcatggttttgggactgttcgtgcctccagtgtttgtggtgtcatacgcaaaggatcttggcgtgcctgataccaaagcagcttttcttcttaccattctggggtttatagacatatttgcacgaccagccgcagggtttgttgcgggtcttggaaaggtgcgcccatactccgtgtacctgttttcgtttagcatgttctttaacggcctggcagacctcgcaggatccactgccggagactatggtggtttggtggtgttttgtatcttttttggtatttcctacggcatggtgggcgcactgcagttcgaagtcctgatggccattgtcggaactcacaaattctcctcggcaattgggcttgtgcttcttatggaggctgtcgctgtgcttgtgggtcctccctccggaggaaaattgcttgatgcgacccatgtctacatgtacgtgtttattctggcaggagccgaagtgctgacctcctccctcattctcctccttggaaacttcttctgcatcagaaagaagccgaaggaaccgcagcctgaagtggcggcagccgaagaagagaagctgcataaacccccagcggattcaggagtggacctcagagaagttgaacatttcctgaaggcagaaccggaaaagaacggggaagtggtgcataccccagaaacctcagtt

SEQ ID NO: 33777 - DNA, 1395 bp, synthetic construct
  misc_feature 1..1395: note = Description of Artificial Sequence: Synthetic coding sequence
  source 1..1395: mol_type = other DNA
atgggaggggccgtggtggatgagggacctaccggtgtgaaagcgcctgatggtggttggggttgggcggttctgttcggctgtttcgtgattaccgggtttagctacgcctttcccaaggcagtgagcgtattctttaaggagctgatccaagagttcggaatcggctactctgacactgcgtggatatcctcgatcctgctggcaatgctgtacgggactggccctctgtgttccgtgtgcgtgaaccgcttcggctgtcggccagtcatgttggtcggaggccttttcgcatccctgggaatggtcgccgcttcattttgtagatccattattcaggtctacctgacgactggagtcattacgggattggggctggcacttaactttcaaccttccctgatcatgcttaacagatacttttccaaaaggcgcccaatggcaaacgggttggccgcggctgggtcgcctgtgttcctttgtgccctttccccgctgggccaacttcttcaagataggtacggatggcgcggaggtttccttatccttggaggactgctgcttaattgttgtgtgtgcgcagccctcatgcgtccgctcgtggtcactgcacagcctggatcgggtccaccaagaccgagccgacgtctgcttgatctttcagtctttagggatcgcgggtttgtgctctatgcagtcgcggccagcgtgatggtgctcgggctgttcgtgccccctgtgttcgtggtgtcatacgcgaaggacttgggagtccccgatacgaaggctgctttcctgctcaccattctcgggtttatagacatttttgctcggccggcagcagggttcgtggccgggctgggaaaggtccgtccctactccgtgtaccttttctcgtttagcatgtttttcaatgggcttgcagatctggcaggctccacggcaggggattacggcgggcttgtggtgttttgtattttctttggaatcagctacggtatggtgggagcactccaatttgaagtgttgatggcaatcgtcggtacccataagttttcttccgctattgggctggtgctgctcatggaagccgtggccgtgcttgtgggtcctccatccggcggaaaacttctcgatgcaactcacgtctacatgtatgtgtttattctggcgggagcagaagtgcttactagctcgctcatcttgctcttggggaatttcttttgcatccgtaagaaacctaaagaacctcagcctgaggtcgcagcagcagaggaggaaaaacttcacaaaccccctgcagactcaggagtcgaccttagagaagtcgagcattttctgaaagccgaaccagaaaagaacggagaagtcgtgcatactcctgagacttcagtc

SEQ ID NO: 33778 - DNA, 1395 bp, synthetic construct
  misc_feature 1..1395: note = Description of Artificial Sequence: Synthetic coding sequence
  source 1..1395: mol_type = other DNA
atgggaggcgccgtagtcgatgaaggcccaaccggcgtaaaggctcccgatggggggtggggctgggccgtcctgttcggatgcttcgtgattactggctttagctacgctttcccaaaggccgtgtctgtgttctttaaagagctaatacaggagttcgggatcgggtatagcgacaccgcttggatttcctctattttgctcgccatgctgtatggaactggccctctatgttccgtctgcgtaaatagatttggatgtagacctgtgatgctggtgggtggtctgtttgcatcactgggaatggtagctgccagtttctgtcgcagtatcattcaggtgtacctgacaactggggtgattacaggactggggctggccctgaacttccagccgtcactgatcatgctgaatcgctacttctcaaagaggcggccaatggctaatggcctggccgcggcagggagcccagtttttctatgcgcgttgagccctctaggacagctactgcaggaccgatacggttggcgcggggggttcctgattctaggcggcttactgctgaactgttgcgtgtgcgcggcactcatgagacccctcgtcgtgacggcccagcccgggtctggccccccacgtcctagtaggcgccttctcgacctgagcgtctttagggacagggggtttgtgttatacgcggtggcagctagtgtaatggtgctgggcttgttcgttccccccgtttttgtggtgtcatacgctaaggacctgggcgttcccgatacaaaagcagcctttctgctgacaattcttggtttcattgacatattcgccaggccggcagccgggtttgtggctgggctggggaaggtgagaccatacagcgtctatctcttcagtttttccatgtttttcaacggattggctgatctggcaggttccaccgcaggcgattacggaggccttgtggtgttttgtatcttcttcgggatttcctatggaatggtgggcgccctgcagtttgaagttctaatggccatagtcgggacacataagttctcttcggcgatcggtttggtgctgcttatggaagctgtggccgtgctcgtagggcccccttcggggggaaaacttttagacgccacacacgtatacatgtatgtttttatcttggctggggccgaggtgctcaccagctccctgattctcctcctgggaaatttcttttgcataagaaagaaacctaaggagccccagccagaagtggccgcagccgaggaggaaaagctacataagccacccgctgatagcggggtcgacctgcgcgaagtggaacacttcctaaaggctgagcccgaaaagaatggagaagtggtacatacccctgagaccagcgtg

SEQ ID NO: 33779 - DNA, 1395 bp, synthetic construct
  misc_feature 1..1395: note = Description of Artificial Sequence: Synthetic coding sequence
  source 1..1395: mol_type = other DNA
atggggggagcagtcgtggacgaaggacctacaggcgtcaaagctcccgacgggggatgggggtgggcggtccttttcggctgttttgtaataaccggcttttcctacgcttttcctaaagccgttagtgtattttttaaagaactgatccaggaatttgggatcggctactccgatactgcctggataagcagcatccttctggccatgttatatggcacaggacccttatgcagcgtgtgtgtgaatagatttggatgccgccctgttatgctggtggggggcttgtttgcaagcctggggatggtggcagcctccttctgtcgtagcatcattcaagtgtacctcacgaccggagtgataaccggactcggactggcacttaactttcagcctagtctgattatgctgaatcgctacttttctaagagacgaccgatggccaatgggctggcagccgcgggctctcctgtgttcttgtgcgcactgtccccactgggtcagctgctccaggatcgctacgggtggcggggcgggttccttattcttgggggcttgcttctgaactgctgtgtctgtgctgccctcatgagacctctggtggttaccgcccagccaggctccggccccccccgtccatcccggcgcctgctagatctgtctgtgttcagggaccggggctttgtgctgtacgctgtggccgctagcgtgatggttttgggacttttcgtgccgcctgtttttgtagtgtcttatgcaaaggacctgggtgtgcctgacacgaaggcagctttcctactgacaatcttaggcttcatagacatttttgcccgtcctgcagccgggttcgtagccgggcttggtaaggtccggccctatagcgtgtacttgttttctttctcaatgttttttaatggcctggcggacctcgcaggctctaccgccggtgattatgggggcttggtcgttttttgtattttctttggcatcagttatggcatggtgggcgctctgcagttcgaagttttgatggcgattgtgggaacacacaagttttcctctgccataggactggtgctcctgatggaagccgtggctgtactagtggggccaccatctggcgggaagctgttggatgctacacatgtctatatgtacgtatttatccttgccggggccgaagtgctcacatcatccttgatcctccttctgggtaatttcttctgtatcagaaagaagcccaaagagccccaacccgaagtggccgccgccgaagaggaaaagctacataagcccccagctgactccggagtggatttgcgagaggtagagcacttcctgaaagccgagcctgaaaaaaatggtgaggtggttcacacacccgagacatccgtc

SEQ ID NO: 33780 - DNA, 1395 bp, synthetic construct
  misc_feature 1..1395: note = Description of Artificial Sequence: Synthetic coding sequence
  source 1..1395: mol_type = other DNA
atggggggcgctgttgtggatgagggaccgacaggagtgaaagcacccgatggcggatggggctgggccgtacttttcggctgcttcgtgattaccggattttcttatgccttccccaaggctgtcagcgtgttttttaaggagctcatacaagagttcggaatcggctattccgacacagcgtggatatcatcaatactgttagctatgttgtacggcactggacccctgtgttccgtatgtgttaaccgatttggctgccgacctgtgatgttggttgggggcctgttcgcctctctcggaatggtggctgcgagtttttgcaggtccatcatacaggtctatctaaccaccggcgtcataactggtctgggcttggctttgaactttcagcccagcctgatcatgctgaataggtactttagcaagcgtcgccctatggccaacgggctggctgcagcaggatctccggtattcctgtgtgcgctttcaccactcggccaattgctccaggaccgctatggatggcggggcggatttctcatcctgggcggattgctcctcaactgctgcgtctgtgccgcgctgatgcgcccattggtggtgaccgctcaacctgggtctgggccacccaggcccagtaggaggctccttgatctttctgtgtttagagacagaggatttgtgctatatgcagtagccgcctctgtcatggtcctgggactctttgttccccctgtgttcgtagttagctacgccaaagatctcggagtccccgataccaaagccgccttcctcctgactatattgggatttattgacatcttcgctcggcccgctgccggctttgtcgctggactcggaaaagtaaggccctatagtgtctacctattttctttctctatgttttttaatggtctggcagatctggctggaagtaccgcaggggactacggcggcctagttgttttttgtatcttttttggcataagttacgggatggttggtgctttgcaattcgaagtgttaatggccatagtgggcacacacaagttttctagtgctatagggttagtgctgctcatggaagcagtagcggtgctcgtagggccccctagtggtggaaagcttctggacgctacacatgtgtatatgtacgtctttatcctggccggcgcagaggttctgacgtcctcactgatactcctcctcgggaattttttttgtattcgcaagaagccaaaggaaccccaacctgaagtggcagccgccgaggaagaaaagctccataagcctcccgcggattccggggtggacttgcgagaagtggaacacttcctgaaggccgagcccgagaagaatggagaggtggtccatacacctgaaaccagcgtc

SEQ ID NO: 33781 - DNA, 1395 bp, synthetic construct
  misc_feature 1..1395: note = Description of Artificial Sequence: Synthetic coding sequence
  source 1..1395: mol_type = other DNA
atggggggcgcggtcgttgacgaaggacctaccggagtgaaggcccctgatggcggctggggctgggctgtgctgtttggatgctttgtgatcaccggattttcttatgcctttcctaaagctgtgagcgtctttttcaaagagttaatacaggaatttggaatcgggtacagtgacaccgcatggatttcatcaatcttgcttgccatgctttacggcacaggacccttgtgctcagtctgcgtgaacaggttcggctgtcggccagtgatgttggtaggcgggttattcgcaagccttgggatggtggcggctagcttttgcaggagcatcatccaggtgtatctgacaaccggagtaatcactggcctgggactcgctttaaacttccagccgtctctcatcatgctcaaccgctatttctctaaaagaaggcctatggctaacggcctggcagctgcaggatcgcccgtgttcctttgtgcacttagccctttaggccagttgctgcaggacagatacggctggaggggtggctttctgatcctgggaggactgctgctgaactgttgtgtgtgcgctgcgctcatgaggcctctggtggtcacggcacagccaggctcaggaccacccaggcccagcaggaggttgttggacctgtctgtgtttagagacagggggttcgtgttatacgcagtggctgcctctgtcatggtgcttggcctcttcgtacccccagtgttcgtggtttcgtatgcaaaagatctgggagtcccagacaccaaggccgccttcctgttgacaatcctcggattcatagacatcttcgcgagacccgcagctggatttgtcgcaggcctgggcaaggtccggccatactctgtgtacttgttcagcttttctatgttctttaacggattagctgacctggcgggcagcaccgctggcgattacggcggactggtcgtcttttgcatatttttcggcatttcatacggcatggtgggagctctacaattcgaggtcctgatggccattgttggcacacacaaattctcgtcggctatcggtcttgtgctgctgatggaagccgtcgccgtgctggtgggtccacccagcggtggaaagctcctggacgccacccatgtttacatgtacgttttcatcctggcaggcgcggaggtgctgaccagtagcctcatcttgctcctcggtaactttttctgtatccggaaaaagccaaaagagccccaaccggaggttgccgcggcagaggaagaaaagcttcacaaaccacccgctgactcaggcgttgacctgagagaggtcgagcattttctgaaagcggaacctgaaaagaacggcgaggtggtgcatacacctgaaacaagtgtg

SEQ ID NO: 33782 - DNA, 1395 bp, synthetic construct
  misc_feature 1..1395: note = Description of Artificial Sequence: Synthetic coding sequence
  source 1..1395: mol_type = other DNA
atgggcggcgctgtcgttgatgagggtccgacgggcgtgaaggcaccggatggcggctggggctgggcggtgctgttcggttgttttgtcattaccggttttagctatgcctttccaaaggcggtatccgtctttttcaaagagttgattcaggaatttggtatcggttacagcgataccgcatggatctcctccattctgctagcgatgctctatggtactggtccgctgtgttcagtgtgcgtgaatcgctttggctgccgacctgtgatgctggtgggtggcctgttcgccagcctggggatggttgctgcctccttctgccgcagcattattcaggtttacctgactacgggtgtgattacagggctgggtctggcactcaacttccagcctagcttgatcatgctgaatcgatatttctctaaacgtcgcccaatggccaacggattagctgccgctgggtcacctgtcttcctgtgtgcactgagcccgctggggcagctgctgcaggaccgctacggatggcgcgggggtttcttaatcctgggaggcctgctgttaaactgctgtgtttgcgctgcactgatgcgcccgctcgtcgtaaccgcccaaccaggatcgggcccgccgcgcccgtcccgccgactcctggatctaagcgtgtttagggaccgcgggttcgtactttatgccgtggcggcctcagtgatggtgctggggttgtttgtcccaccggtgtttgtggtgtcctatgcgaaagatctgggggtgcctgataccaaggccgcatttctgctaaccatcctgggattcattgatatttttgcccgccccgcggctggctttgtggccgggctcggtaaagtgcgcccttactctgtttacttgttctccttttccatgttctttaacggcctggcggatttggctggtagcaccgcgggggactacggcggcttggtcgttttttgcattttcttcggtattagttacggtatggtgggagccctgcagttcgaggtgttaatggcgattgtcggcactcacaagtttagcagcgctattggtctggtgttactcatggaggcagtcgccgtgttggtcggcccgccatctggtggcaagttgctcgacgccacccatgtttacatgtacgttttcatcttagctggtgccgaggttctgacttctagcctgatactactcctcggtaactttttttgcattaggaagaagccgaaggaaccacaaccagaagtagcagcagcggaagaagagaagctgcacaagcctccagcggactctggcgtcgacctgcgcgaggttgagcattttctgaaggcggagccggagaagaacggggaagttgtgcacaccccagagaccagcgtg

SEQ ID NO: 33783 - DNA, 1395 bp, synthetic construct
  misc_feature 1..1395: note = Description of Artificial Sequence: Synthetic coding sequence
  source 1..1395: mol_type = other DNA
atgggaggtgcagtggtcgatgaaggaccaacaggagtaaaagcaccagatggaggctggggttgggccgtgttgttcggatgcttcgtgatcacaggattctcatatgcattcccaaaggcagtctctgtctttttcaaggaactgattcaggagttcggaatcggatactccgatacagcttggattagttcaatactgctagcgatgttatatggaaccggaccattgtgtagcgtgtgtgttaaccgcttcggatgtcgcccggtaatgctggtcggtggactgttcgcctcattgggaatggtcgcagcttctttttgtagatcaattattcaagtgtacttgactacaggggttatcactggactaggactcgctcttaacttccaaccgtcattgattatgctcaatagatatttcagcaaacgtagaccaatggcaaatggtttggcagcagctgggagtccagttttcttgtgtgctttatctccactgggacaacttttacaagatcgatatggatggcgtggaggattcttgattttgggcggactcctcttgaattgttgcgtttgcgctgctctcatgcgacccctcgtcgtgaccgcacaacctggtagcggtccaccaagaccatcccgtaggctcttggatctgtccgtctttagggaccggggatttgttttgtatgcggttgctgcttcagtcatggttctgggactctttgtcccaccagttttcgtagtaagttatgctaaagatttgggggtccctgatacaaaggcagcttttctgctcacgatccttggattcattgacatcttcgcaagaccagcagcgggatttgttgcaggtctgggcaaggtacgaccatactctgtgtatcttttttctttctcaatgttttttaacggactcgcagatttggctggatcaacggcaggagattatggaggattggtggttttttgcatttttttcggtatttcatacgggatggtaggcgcactacaatttgaagttctcatggctatagtaggaacacacaagttttctagtgctatcggcctagtgctattgatggaagctgttgcagttttggtggggccgccatccggtggaaagttgcttgacgcaacgcatgtgtacatgtatgtatttattctggcaggagcggaggtgctcacctcgtcccttatactacttctgggaaattttttctgtattcgtaagaaaccaaaggaaccgcaaccagaagtcgcggctgccgaggaggagaaactgcataaaccgcctgcagatagtggggtggatttgcgggaagtcgaacactttctcaaagctgaacctgagaaaaatggagaagttgttcatacacctgagacttccgtg

SEQ ID NO: 33784 - DNA, 1395 bp, synthetic construct
  misc_feature 1..1395: note = Description of Artificial Sequence: Synthetic coding sequence
  source 1..1395: mol_type = other DNA
atggggggcgctgtggtcgatgagggacccactggtgtaaaagcacctgacggaggctggggatgggctgtactttttggctgttttgtcataacaggtttcagctacgcatttcccaaggccgtgtcagttttcttcaaggagctcatccaggaattcgggattggttatagtgacacagcctggatcagtagtattttgttggccatgctctacggaaccggtcctctgtgctcagtctgcgtcaacaggttcggatgtcgcccagtgatgctggttgggggactctttgcatctttgggaatggtggcggcctccttttgccggtctatcatccaggtgtaccttaccaccggagtaatcacaggccttggcttggcgttgaactttcagccaagtctgattatgcttaacaggtacttttccaaaaggcgcccaatggccaacggactcgccgccgctgggagccctgttttcctgtgcgcactctcccctctgggccagctgctgcaggatcggtacggctggaggggcggatttctgatcctggggggactcctgctgaactgttgcgtatgcgccgcacttatgcggcctctggtcgtgaccgctcagccaggttccggcccgccaaggcctagcagaagactgctggacctgtccgtgttcagggaccggggattcgtgttgtacgctgtggccgctagcgtgatggtgcttgggctgttcgtgcctccggtcttcgtcgttagttacgctaaggacctcggcgtgcctgatacaaaagccgcgttccttctgactattctcggctttattgatatctttgcccgacccgccgcgggttttgtggctgggctggggaaggtgcgaccctattccgtctacctttttagcttctccatgttctttaacgggcttgctgatctggctggatccacagctggggattatggcgggctggtcgtgttttgtattttcttcgggatttcttacggcatggtcggtgctctgcagttcgaagtgctgatggccattgtggggacccacaagtttagtagcgctatcggcctcgtgctgctgatggaggcggtcgccgtgttggttggccccccgtcaggaggcaagcttctcgacgcgacacatgtgtatatgtacgtgttcatcctggcgggagctgaggtgctgactagctcactgatcctcctgcttggaaactttttctgcatacggaaaaagcccaaggagcctcagcccgaggtggcggctgccgaagaggaaaagttgcataagccccctgccgattccggggtggatctgcgcgaagtggaacacttcctgaaagcagagcccgaaaagaatggcgaggtagtgcatacgccagaaacaagcgtc

SEQ ID NO: 33785 - DNA, 1395 bp, synthetic construct
  misc_feature 1..1395: note = Description of Artificial Sequence: Synthetic coding sequence
  source 1..1395: mol_type = other DNA
atgggcggagccgtggtcgacgaaggcccaaccggagtgaaggccccggacgggggctggggatgggcagtgctgttcgggtgttttgtcataactggtttctcatacgctttcccgaaagcagtgtccgtattcttcaaagaactcatccaggagttcggaatcggatactcggacacggcctggatctcgtcgatccttctggctatgctctacggcaccgggccgctgtgcagtgtttgcgtgaacagatttggatgccgcccggtgatgctcgtgggaggcctttttgcgtcgctgggcatggtcgcggcttcgttttgccgttcaatcatccaagtctacctcactaccggggtgattactggactgggacttgccctgaattttcagccgagcctgatcatgctgaaccgctacttcagcaaacggcgtccaatggcgaatggcctcgcagccgccggctccccggtgttcctttgcgccctctcacctctgggacaactgctgcaggatagatacggctggagaggaggattcttgatccttggcggtctgctccttaattgttgtgtatgcgcggctctgatgcggccacttgtcgtgactgctcagcctgggagcggtcctccgcgcccgagtcgccggctgctcgacctgtccgtgtttagggatcggggattcgtgctttatgccgttgcggcatcggtgatggtgctggggctctttgtgcctccagtgttcgtagtgtcgtacgcgaaggatctgggagtgcccgacaccaaggccgcctttctgctgaccattcttggattcatcgacatctttgcacggccagcggcaggattcgtggctggactgggcaaagtccgcccctactcagtctatctcttctctttctcgatgttcttcaacggactggcagatctggctggatcgaccgccggagactacggcggcctcgtggtgttctgcattttcttcggtatctcctacggaatggtgggtgccctccagttcgaggtgcttatggctatcgtcgggactcacaagttctcttccgccatcggactggttctcttgatggaagcggtcgctgtcttggttggaccaccaagcgggggaaagctgctcgatgcaacccacgtgtacatgtacgtgtttatcttggccggagccgaggtcctcacgtcctcactgatcttgctgcttggcaactttttctgcattcgcaagaagccgaaggagcctcaaccggaagtggctgcggccgaggaggagaaactgcataagccgcctgcggacagcggagtggatctgagggaagtggagcatttcctgaaggccgaaccagaaaagaacggtgaagtcgtccacaccccagaaacttccgtg

SEQ ID NO: 33786 - DNA, 1395 bp, synthetic construct
  misc_feature 1..1395: note = Description of Artificial Sequence: Synthetic coding sequence
  source 1..1395: mol_type = other DNA
atggggggagcggtggtcgatgaaggcccgaccggtgtcaaggcccccgacggcggttggggttgggcagtcctttttgggtgttttgtgatcactggtttctcgtatgcgttcccgaaggccgtgtccgtgttctttaaggagcttattcaagaatttggcattggttactccgatactgcatggatttccagcattctgctggctatgttgtacggtactggacctctttgctcagtgtgcgtgaataggtttggatgtaggccagtcatgctcgtcgggggactgtttgcgtccctgggaatggtggcagcctctttttgtaggtcgattatccaggtgtacctgacgaccggtgtgattacgggtcttgggctcgcactcaactttcaaccaagtctcattatgctgaaccgctacttcagcaagaggcggccgatggcaaacggactcgccgcggcaggttccccggtgtttctttgtgcactcagccccttgggccaactcctgcaagatcgctacggatggagaggagggttcctgattctcggtggactcctcctgaactgttgtgtgtgcgcggccctcatgcggccactcgtggtcaccgcccagccgggatccggtcctccgcggccttcacgccgactcctggacctttcggtgtttagagataggggatttgtgctgtacgccgtcgccgcgtcggtcatggtccttggcctttttgtccctccagtgttcgtggtgagctatgcaaaagatttgggtgtgccagatactaaggctgcatttctgctgaccattcttggttttatcgacatttttgcaagacctgcagcggggttcgtggcaggacttggcaaggtgcgtccatactcagtctaccttttcagctttagcatgtttttcaatggattggcagatcttgcaggttcgacggctggtgattacggtggtttggtggttttctgtattttctttggcatcagctacggaatggtgggagccctgcaatttgaagtgctgatggcaatcgtggggacgcacaagttctcctcagcaattgggctcgtgctccttatggaagctgtggcagtgctcgtggggcctccaagcggtggaaaactcctggatgcaactcacgtctacatgtacgtgtttattcttgccggcgctgaggttctcacctcgtccctgatccttctgctgggcaactttttctgcatcagaaagaaacctaaggaaccacagccagaggtcgccgcagcagaggaagaaaaactgcataagccccccgcagacagcggtgtcgatctgagagaagtggagcatttccttaaagctgaaccagagaaaaatggtgaagttgtccacactccagagacttcagtg

SEQ ID NO: 33787 - DNA, 1395 bp, synthetic construct
  misc_feature 1..1395: note = Description of Artificial Sequence: Synthetic coding sequence
  source 1..1395: mol_type = other DNA
atgggaggcgctgtcgtggacgaaggaccaaccggagttaaggcaccagatggaggttggggctgggcagtcctgtttggatgttttgttattaccggcttctcgtacgcatttcccaaagccgtcagcgtgtttttcaaggagctgattcaagagttcggtatcgggtactccgacactgcttggattagctccatactccttgctatgctctacggaacgggtcccttgtgctcggtctgtgtcaataggtttggctgcagacccgtgatgcttgttggaggacttttcgcttcgcttggaatggtggcagcctcgttttgtagaagcattatacaggtatatctgactaccggagtgatcaccgggttggggctcgcattgaattttcagccgtcactgataatgcttaacagatacttttcgaaacgacgaccgatggcgaacggccttgcagcggcagggtcccctgtgtttctgtgtgctctctcgccactgggtcaactgcttcaagaccggtacgggtggcggggtgggtttctcattctgggcgggcttctgctgaactgttgcgtgtgtgcagctcttatgaggcctctcgtcgtgaccgcccagcctggttcaggacctccacggcctagtcgaagattgcttgatctttccgtattcagggatcgcggcttcgtcctctacgcggtggccgcatcggtcatggtcctcggacttttcgtgcctcccgtctttgtggtaagttatgcaaaagatctcggtgtgccagatactaaggcagcatttctgttgaccatcctcggattcattgatatctttgcacgccctgccgcaggctttgttgcaggactgggaaaggtgcgtccttactctgtgtacctcttctccttttcaatgtttttcaatggacttgccgaccttgcgggatctactgcaggcgattacggcggtctggtggtgttttgcatattctttggaatttcctacgggatggtgggagcgctgcaatttgaggtgttgatggcaattgtcggaactcacaaattctcttccgccattgggctcgtgttgctgatggaggcagttgcagtgcttgtgggtcctccgtcgggcggtaagctgctcgacgcgacccatgtctacatgtacgtgtttatcctggcgggagcggaagtgctgaccagctcccttatcctgcttttgggtaacttcttctgtattcgtaaaaagccgaaagaaccacagccagaagtcgcagccgcagaagaggaaaagctccacaagcccccagcagactccggagtggatcttagagaagtggaacatttcctgaaggcagaacctgaaaagaacggggaagtggtgcatacgcccgagacttccgtg

SEQ ID NO: 33788 - DNA, 1395 bp, synthetic construct
  misc_feature 1..1395: note = Description of Artificial Sequence: Synthetic coding sequence
  source 1..1395: mol_type = other DNA
atgggaggtgccgtcgtagacgagggacctaccggggtgaaggcccctgacggaggctgggggtgggctgtgctctttggttgcttcgtcattactgggttcagttatgcatttccaaaggccgtgtctgttttcttcaaggagcttatccaggagttcggcatcggatattctgacactgcttggatctctagcatccttctagccatgctatatgggaccgggccgctgtgttcagtctgcgtaaaccgtttcggctgtcggcctgtaatgctagtcggcgggctctttgccagcctgggcatggtagcagcctccttctgtcggtccatcatccaggtatacctgacgaccggggtgatcaccggtctaggcctggccttgaatttccagcctagtctaattatgcttaatcggtacttctcaaagcggcgacccatggcaaacggcctggccgcagctggatcgccagtattcctctgtgccctcagtcccctcggccaactacttcaagacagatacggctggagaggtggattcctgattctgggtgggcttcttctgaattgctgtgtgtgcgcagccttgatgcgacctctggtcgtgacggctcaacccggcagcggcccgcctaggccaagccgcagactgctggacctcagcgtctttagagacaggggctttgtgctgtacgcagtggcggcatctgtaatggtactggggttatttgtgcctcctgtcttcgtggtcagctacgccaaggatctgggcgttcccgataccaaggcggcgtttctcctcacgatccttggcttcatcgatatcttcgcacgacctgccgctggttttgttgcaggattaggaaaggttagaccatatagcgtgtacttattctcttttagcatgttcttcaatggcctggcggatcttgcagggagtactgctggagattacggaggcttggtggtgttttgtattttctttgggattagttacggcatggtcggggccctgcaattcgaggtcctgatggccattgttggaacccataaattttcttcggccattgggttggtactgctgatggaagccgtcgcggtccttgtcgggccaccctccggagggaagttgctggatgctacccacgtgtacatgtacgtgttcatcctggctggagcggaagtgcttacatcaagcctgatcctgttactcggcaacttcttctgtatccgaaaaaagcctaaggagccacagcccgaagtggctgccgccgaggaggagaaactgcataagcctcctgcagatagcggggtagacctgcgagaggtggagcatttcctgaaggcggaacccgaaaagaacggcgaggtggtgcacacaccggaaacatccgtg

SEQ ID NO: 33789 - DNA, 1395 bp, synthetic construct
  misc_feature 1..1395: note = Description of Artificial Sequence: Synthetic coding sequence
  source 1..1395: mol_type = other DNA
atgggaggggccgtggtggacgagggacctaccggcgtgaaagcccctgatgggggctggggctgggcagtcttgttcgggtgctttgtgataacggggtttagttatgcctttccaaaggctgtttccgtgttctttaaagagctcattcaagagtttgggatcggatattccgatacggcttggattagctctatcctgctggccatgctctacggaaccggacccctttgctctgtgtgcgtcaatcgcttcggttgtagacccgtgatgcttgtgggtggtctgttcgcctcactgggaatggtggccgcatccttttgtaggagtatcatccaggtgtacctcacaacaggagtgattactgggctcggcctggccctgaatttccagccatccctgatcatgctgaacagatatttcagcaagagacggcccatggccaacggcctggctgcagctggcagtccggtctttctctgtgccctgtctcccctgggccaattgctgcaggatcgatacggatggaggggcggcttcttgattctgggcggtctcctcctgaactgctgtgtctgcgctgccttgatgagaccattggtggtgacagcccaacccggctctggacctccacgcccctctagaaggctcctggatctttctgtgttcagggatcgaggcttcgtgctgtacgccgttgcggctagcgtcatggtcctcggcctgttcgtgccaccggtgtttgtcgtgagttacgctaaggacctgggtgtgccggacactaaagccgccttccttctcaccatactgggctttatcgatattttcgcccggccggccgccggtttcgtggctgggctgggcaaggttaggccttatagcgtgtatttgttctccttcagtatgtttttcaacgggctggccgacctggccggatcaacagcaggggattatggtggtctcgtggtgttctgcatcttctttggcatttcttacggtatggttggggcccttcaattcgaagtgctcatggctatcgtggggacccacaagttctcctctgcaatcggccttgtgctcctcatggaggccgtggctgtgctcgttggcccaccctccggcggtaaactccttgatgccacacacgtctatatgtatgtgtttattctggccggagccgaagtgttgaccagctccctgatcctgttgctggggaacttcttctgtatcagaaagaagccaaaagagcctcagcccgaagtcgcggcagctgaagaggaaaagctgcacaagccacctgcagactcaggcgtcgacttgcgcgaggttgagcatttcctgaaggctgaacccgaaaaaaatggggaggttgtccacacgcccgagacgagtgtt

SEQ ID NO: 33790 - DNA, 1395 bp, synthetic construct
  misc_feature 1..1395: note = Description of Artificial Sequence: Synthetic coding sequence
  source 1..1395: mol_type = other DNA
atgggcggcgctgtggttgacgaagggcccacaggcgtcaaagccccggatggaggttggggttgggccgtgctgttcggatgctttgtaattacgggattctcgtacgctttccccaaagctgtgtccgtatttttcaaagagcttattcaggagttcggcattggttatagcgataccgcttggattagcagtatactcctggccatgctgtatggcacaggcccgctatgcagtgtctgtgtgaaccgcttcggttgcaggccagtcatgttggtgggtggactgttcgcctccttaggcatggtagccgccagcttctgccgcagcataattcaggtgtacctgactacaggcgtaataaccggattgggactggcgctgaacttccagccctccctgatcatgctgaaccgctactttagcaagcgacgccccatggccaatggtctggcagcagctggctcccccgtctttttatgcgccctgtcaccgttaggccagctgcttcaagatcgatatggatggcggggcggttttctgattctgggaggtttgctgctgaactgttgcgtatgcgctgccttgatgcgcccccttgtagtgaccgcacagcctggcagtgggccgccgcgcccctcccgccgactgctggacctcagcgtgttccgtgaccgtggatttgtactgtacgcggtggcggcgtccgttatggtgttaggcttgttcgtccccccggtgtttgtagtcagctacgccaaggacttgggcgtgccggataccaaggcagccttcctgctgaccattttaggattcatcgatatttttgcacgcccagcagctggatttgtggccggcttgggtaaggtccgaccatatagcgtgtaccttttttcattctcgatgttttttaacggcctggcggatctggctggctctactgcaggcgactacggtggtctggtggttttttgtattttcttcggtataagttacggtatggtgggagccctgcagttcgaagtgcttatggccatagtggggactcataagttcagctcggcaatcggtctcgtgctgctgatggaagcagtcgctgtgctcgtcggcccgccctcgggaggtaagttgttagacgccacccacgtttatatgtacgtgttcatcctcgctggtgccgaggtgttgacgagtagccttattctgttgctcggcaatttcttctgcattcgcaagaagcccaaggagccacaacctgaggtcgctgccgccgaggaggagaagttgcacaaaccacccgctgactccggcgtggacctccgggaggtggagcacttcctgaaggccgagcctgaaaagaatggcgaagtcgtccacaccccggagacgtcggta

SEQ ID NO: 33791 - DNA, 1395 bp, synthetic construct
  misc_feature 1..1395: note = Description of Artificial Sequence: Synthetic coding sequence
  source 1..1395: mol_type = other DNA
atgggcggcgccgtggtcgatgaaggaccgactggagttaaggccccagacggcgggtggggctgggccgttctcttcgggtgctttgtgatcacgggtttttcctacgcatttcccaaagcagtgtccgtgttctttaaagagcttatccaagaattcggcatcggctattccgacactgcatggatctcttcaatcctgctggctatgctgtatggcactggcccactctgttctgtgtgtgtaaaccgattcggctgccgccccgtgatgctggttggcggtctcttcgcaagtttggggatggtggccgcatctttttgtcgctctatcatccaggtgtacctgacaacgggggtaatcactggcctgggccttgccttgaacttccagccaagtctgataatgctgaatagatacttctctaagcggcgcccaatggctaatggactggcggccgcggggagccccgtgttcctgtgcgccctctccccactgggtcagctgcttcaggaccgatatggttggcggggggggtttttgattctgggaggattgttgctcaattgctgtgtgtgcgccgcactcatgagaccgctggtggtgaccgcccagccgggctctggtccaccacggccatctcggcggctgctcgatctgtccgtctttcgagatagaggcttcgtcctttatgctgtggcagcttcagtgatggtcttggggttgtttgtccccccagtgttcgtcgtgagttacgccaaggatctgggagtgcctgacactaaggcagccttcctgttgacaattctgggctttatcgacatcttcgccagacctgctgctggcttcgtggccggtctcggaaaggtgagaccttatagcgtgtatctcttttccttttccatgtttttcaatggcttggctgatttggctggcagcacagctggtgactacggaggtttggtggtcttctgtatattttttggcatcagctatgggatggtgggcgcgctgcaattcgaggtcctcatggccatcgtcggcacacacaagttcagctctgccattggtctcgtcctgctgatggaggctgtggcggtgttggtggggcctccttctggagggaagttgctggatgcaacgcatgtctacatgtacgtgttcattctcgctggggctgaggtgctgacctcatctctgatcttgctcctgggtaactttttctgtatccgcaaaaagcccaaagaacctcaacctgaagtggccgccgccgaggaagaaaagctgcacaagccaccggctgattccggtgtggatctgcgagaagtcgaacacttcctcaaggccgagcccgagaaaaatggggaggtggtccacacgcctgaaacgagcgtg

SEQ ID NO: 33792 - DNA, 1395 bp, synthetic construct
  misc_feature 1..1395: note = Description of Artificial Sequence: Synthetic coding sequence
  source 1..1395: mol_type = other DNA
atgggcggcgcggtggtggacgaaggacctacaggagtcaaagcccctgatgggggctggggctgggcggttcttttcgggtgtttcgtgataacaggcttttcctatgcatttcctaaagcagtatccgtgtttttcaaagaactgattcaagaattcggcattgggtattcagatacggcatggatatctagcattctgctggccatgctgtatggaaccggcccactctgctccgtgtgcgttaacaggttcggatgcagaccggtgatgctcgttggcggattatttgcttcacttggtatggttgcagcctcattttgtaggtctatcattcaggtctatctgaccacaggcgtaatcactgggcttgggctggcattgaactttcaaccctctttgattatgctgaaccgctatttctccaagcggagaccgatggctaacggtttagcagccgctgggtccccagtgtttttgtgcgcccttagtcccctaggacagctgctgcaagaccggtacggctggaggggaggtttcctgatcctcggcggcttgctcctgaactgttgcgtatgcgccgcactgatgcgcccgctcgtggtgacagcacagcccggttcaggccctccaaggccgtctcgccgcctcctggatctttccgtttttagagataggggcttcgtactctacgctgtggctgcaagtgtgatggtgctgggcctgtttgtacccccagtgtttgtcgtttcttatgctaaagatctcggagttcctgatacaaaggccgcgtttctattaaccatactgggcttcatagacatttttgcacgtcccgccgccgggtttgtagcaggattgggtaaggtgcggccctattccgtgtaccttttttcgtttagcatgtttttcaatgggctggctgacctggccggctccactgccggagattatggaggattggtagttttctgtatcttcttcggcatctcatacggcatggtaggcgccctccagttcgaagtactcatggctatcgtcggtactcataaattttcttctgcaattggcttggtgctcctgatggaggccgtggctgtgctcgtgggcccaccttctggcgggaagctccttgacgcaacccatgtctatatgtatgtcttcatcctggcaggcgccgaggtgctgacatccagtctcattctgctactcgggaattttttctgtattcggaaaaagccgaaggagccgcagcccgaagttgctgccgcggaggaagaaaagcttcacaagccgcccgcggacagcggggttgacctgcgggaggtggaacactttcttaaagctgagcctgagaagaatggagaggtcgtccacaccccggaaacatcagtg

SEQ ID NO: 33793 - DNA, 1395 bp, synthetic construct
  misc_feature 1..1395: note = Description of Artificial Sequence: Synthetic coding sequence
  source 1..1395: mol_type = other DNA
atgggcggcgccgtggtcgacgaaggccccacaggggtcaaagcccccgatggcggctggggctgggcggttctgtttgggtgtttcgtgataacaggattttcatatgccttccctaaggccgtctcagtgttttttaaggagcttatccaggagttcggaatcggatactccgacaccgcctggattagctctatcctcctggccatgctttatggcacgggacccctatgctccgtgtgcgtgaaccgcttcggatgtaggcccgtaatgttggtcgggggcctgtttgctagtctggggatggtggccgcgtcattctgtagatctataatccaggtttacctcacaaccggggtcattacaggcctggggcttgccctcaacttccagccaagcttgatcatgctgaacaggtactttagcaagcgccggcccatggccaatggacttgcggcggctggctctcccgtcttcttgtgcgccctctcccctttgggtcagctgctgcaggacagatatggctggagaggcggattccttatcttgggaggactgctcttgaactgctgtgtgtgcgccgctctgatgaggcctttggtcgtcaccgcacagcccggttcaggaccccctagaccctccaggcgccttttggacctctctgtttttcgggatcggggctttgtgctgtacgccgtggccgccagtgtcatggtgctggggctgtttgtgcctcccgtgtttgtcgtgtcttatgccaaggaccttggtgtgcccgacacaaaagccgcatttctgcttactatactggggttcatcgacatcttcgccagaccagccgctggcttcgtggccggacttggcaaagtgcgtccttacagtgtgtacctattttccttcagtatgttttttaatggcctcgcagacctggcgggaagcaccgctggtgattacggagggctcgtcgtcttttgcattttttttggcatttcttatggaatggtgggagctttgcagtttgaagtactgatggccatagtgggaactcacaagttcagctctgcaatcggcctggtcctgctcatggaggctgttgcggtgctggtggggcccccttctggcgggaagttgctggatgctacccacgtgtacatgtatgtgtttatcctagccggggccgaggtgctcacttcatccctcattctgctgttggggaattttttctgcatccggaagaagcccaaggagccgcagcccgaggtggcagcagccgaagaggagaagctgcacaagcctcctgcggattctggcgtggaccttcgggaggtggaacacttcttaaaagctgaacccgagaagaacggcgaggtcgtccacactcctgagacaagcgta

SEQ ID NO: 33794 - DNA, 1395 bp, synthetic construct
  misc_feature 1..1395: note = Description of Artificial Sequence: Synthetic coding sequence
  source 1..1395: mol_type = other DNA
atgggcggcgcggtggttgatgagggccccacaggagtcaaggcacctgacggagggtggggctgggccgtcctgttcgggtgtttcgtcataaccggcttcagttacgcattcccaaaggcagtcagtgtgttcttcaaggagctgattcaggagttcggaatcggctattccgacaccgcctggattagtagcatcctgctagccatgctctacggtacgggccccctgtgctcagtgtgcgtcaacaggttcggttgcagaccggtgatgctggtgggggggctattcgccagtctggggatggttgccgccagcttttgccggtcgatcatacaggtttacctaactaccggcgttatcaccgggttgggattggcgctcaactttcagccatccctgatcatgctcaacaggtacttcagtaaacggcgtccaatggcaaatgggctggccgctgccggaagcccagtttttctgtgcgcactatcgccattgggtcaactattgcaggacagatatggatggcgtggcggctttctcatcctgggaggcctcctcctgaattgttgtgtgtgtgccgcactgatgcgccccctggtggtgacagctcaaccgggctccggacccccccgtccttcccggcggctgctcgatctgtctgtattccgggaccgaggtttcgtcctgtatgctgttgccgcctctgtgatggtgcttggcttattcgtcccaccagtgtttgtagtgagttacgctaaggatcttggtgtccctgataccaaagccgctttcctccttaccatcctcggtttcattgacatcttcgctcggcccgctgcaggctttgtggcgggtctgggtaaggtaagaccgtactcggtatacttattcagtttctccatgttttttaatgggctggccgatctcgccggttcgacggcgggagactacggtggcctggttgtcttttgtattttttttggcatatcttacggaatggttggagccttacagtttgaagtgttgatggccatcgtgggcactcacaagtttagctcagcaattggcctggttctacttatggaagcagtggcggttttagtgggacctcctagtggcggaaagcttctcgatgctacacatgtttacatgtatgtgttcatcttagcaggggccgaggttctcacgtcttcattgatcttgttgctgggaaactttttctgcatcaggaaaaaacctaaggagcctcagccggaagtggcggccgccgaggaggaaaagctgcacaagccgcctgccgattctggtgtggacctgcgcgaggtcgagcactttctgaaagcagagccagagaaaaacggtgaagtagtccatacacctgagacctccgtc

SEQ ID NO: 33795 - DNA, 1395 bp, synthetic construct
  misc_feature 1..1395: note = Description of Artificial Sequence: Synthetic coding sequence
  source 1..1395: mol_type = other DNA
atggggggcgccgtggttgacgagggccctacaggcgtgaaagctcctgacggcgggtggggatgggccgttctgttcggctgtttcgtgattacaggattctcctatgcgtttccgaaagccgttagtgtttttttcaaagaactgattcaggaatttggtatcggatatagtgatacggcctggatctcgtctatacttcttgccatgctctatgggactggtcctttgtgtagtgtctgtgttaacaggtttggatgtcgcccagtaatgcttgtggggggactgttcgcaagtctgggcatggtggcggcctcgttttgtaggtctatcatccaggtttatctgactaccggagtaatcaccggtctaggcctggcgctgaatttccaaccctcactgatcatgcttaatcggtatttttccaagagaaggccgatggccaatggcctggcagccgctgggagccccgtgtttctctgtgcactgtctcccctggggcagctgctgcaggaccgctatggctggcggggagggttccttatactgggcggcctactcctgaattgctgcgtttgcgccgccctgatgaggccattggtggtcaccgcccagccaggaagcgggcctcctcgcccatcccgacgactcctcgacctgtctgtctttagagacagaggtttcgtactgtacgccgtggccgcctctgtcatggtcctggggctcttcgttccacccgtgttcgtcgtgtcctacgctaaagacctcggagttccagacacaaaagcagccttcctcctgaccatactggggtttatcgacatttttgctcgtcctgcggccggtttcgtggccgggctgggcaaggtaaggccgtactctgtgtatttattctctttctcaatgttttttaacggtcttgccgacctggcagggtctacagctggagattatgggggtttggtggtgttttgtatcttcttcggcataagctatggaatggtcggggctctccaattcgaggtgctcatggcaattgtgggcacccacaaattctcctcggcaattggtctggtgctcctaatggaggctgtagccgttctggttggaccaccctcgggcggcaagctgcttgacgctacacatgtgtacatgtacgtttttatcttggccggtgccgaggtgctaacctctagtctgatcctgcttctgggcaatttcttctgcatcagaaagaaacctaaagaaccgcaacctgaggttgcagcagccgaggaggagaaactgcacaagccacccgcagatagcggcgtggacctgcgagaagtggagcactttctaaaagcagaacccgagaaaaatggcgaagtggtccatacaccagagaccagcgtc

SEQ ID NO: 33796 - DNA, 1491 bp, synthetic construct
  misc_feature 1..1491: note = Description of Artificial Sequence: Synthetic coding sequence
  source 1..1491: mol_type = other DNA
atgacttttaattcatttgaaggatcaaaaacatgcgtgcccgccgatattaacaaggaggaagagttcgtggaggagtttaaccgattgaagacatttgcgaatttcccttccgggagtccggtgtcagcttctacgctggcacgggcaggttttctttacacaggggagggcgacaccgtgcgatgtttttcctgccacgcggcagtagatagatggcagtatggcgattccgcggttggcagacaccgcaaagtatcccccaactgcagattcattaacggtttctatctcgagaacagcgctactcagtccactaattcagggatccaaaacgggcagtacaaggttgagaattacttgggaagccgagaccatttcgctctggatcgacccagcgagacgcatgccgactatcttttgcgcacgggtcaggttgtcgacattagtgatactatctacccaagaaatcccgcaatgtattctgaggaagctagactgaaatcctttcagaactggcccgactatgcacatttgacaccccgggaattggcttctgctggactctactatactggcattggggatcaggtgcaatgcttttgctgcggcggtaaactgaagaactgggagccctgtgaccgggcgtggagtgagcaccggcgccactttccgaattgctttttcgtgcttggccggaacctgaacatccgctctgagtcagatgctgtgtcatcagacagaaacttccccaatagtactaatctccctagaaatcctagcatggcagactatgaagctaggatattcaccttcggcacatggatctatagcgtgaacaaggaacagctggcccgagccggattctatgccctgggcgaaggcgacaaggtcaaatgcttccactgtgggggtggcctgaccgactggaaaccctcagaagacccatgggagcaacatgccaagtggtatcccggatgcaagtatctcttggagcagaagggacaagagtacatcaacaatatccaccttacgcactcactcgaagagtgtctggtgagaactacagagaagactcccagtcttaccagacgcatcgacgacaccatatttcagaatcctatggtacaggaggccatcaggatgggcttttccttcaaggatatcaagaagatcatggaggaaaaaatacaaattagcggatcaaactataagtcccttgaagtcttggtcgctgacctggtcaacgcccagaaagactctatgcaggacgagtcttctcagacctccctgcagaaagagatttccacagaggagcagctccgaaggcttcaggaggagaaactgtgtaaaatttgcatggacagaaacatcgccatcgtctttgttccatgtgggcatctggtgacttgtaagcaatgcgcagaggccgtggacaagtgccctatgtgctacacagttattacatttaagcagaagatatttatgagc

SEQ ID NO: 33797 - DNA, 1491 bp, synthetic construct
  misc_feature 1..1491: note = Description of Artificial Sequence: Synthetic coding sequence
  source 1..1491: mol_type = other DNA
atgaccttcaatagcttcgaaggttccaagacctgcgtgccagcggacatcaacaaggaagaggaatttgtggaggaattcaataggctgaaaactttcgccaacttcccgtcgggctctcctgtgagcgcaagcaccttggccagagccggattcctgtacaccggagaaggggacactgtgcggtgcttctcatgccatgcggccgtcgatcggtggcagtacggagattccgccgtcgggcgccatcggaaggtcagtccgaactgccggttcatcaatggattctacctggaaaattccgccacccagagcactaactcgggaatccagaacggacagtacaaggtggagaactacctcggatccagggaccacttcgccctggaccgcccgtcagagactcacgccgattacctgcttaggactggacaagtcgttgacatatcagatacgatctacccgcgcaaccccgccatgtacagcgaagaagcgcggctcaaaagttttcagaactggcctgactacgcgcacctgaccccgagagagctggcctccgccgggctgtactacactggaatcggcgaccaggtccagtgcttctgctgtggaggcaagttgaagaactgggagccgtgtgacagagcttggtcggagcataggcggcacttcccgaattgctttttcgtgctgggtcggaatctcaatatccggtcggagtcggatgcagtctcgtcggacagaaactttccaaactcaaccaatctcccgcggaacccatccatggccgattacgaggcccgcatcttcaccttcggcacctggatctactcagtgaataaagaacagcttgcccgtgccggattctacgcgctgggcgagggagacaaggtgaaatgcttccactgcggtggaggcctcacggactggaagccgtccgaagatccttgggagcaacacgcgaagtggtaccctggttgcaagtacctcctcgaacaaaaaggacaggagtacatcaataacatccacctcacccatagcctggaagaatgcctggtccgcacgaccgaaaagaccccgtcgttgaccagacgcattgatgacaccatctttcagaacccgatggtccaagaagccatccgtatgggattctcgtttaaggatatcaagaaaatcatggaggagaaaatccagatctctggatccaactacaaatccctcgaggtgctcgttgcggatttggtgaacgcacaaaaggactctatgcaggatgagtcgagccagacctcacttcagaaagagatctcaaccgaggagcaactccgccggctgcaggaggaaaaactgtgcaagatctgcatggacaggaacatcgccattgtgtttgtgccctgtggacacctggtgacctgtaagcaatgcgctgaggctgtggataagtgtcctatgtgctacactgtgataaccttcaagcaaaagatcttcatgtcg

SEQ ID NO: 33798 - DNA, 1491 bp, synthetic construct
  misc_feature 1..1491: note = Description of Artificial Sequence: Synthetic coding sequence
  source 1..1491: mol_type = other DNA
atgactttcaactcctttgagggaagcaaaacctgtgtgccggctgatatcaataaagaggaggaatttgtggaggaattcaaccggctcaaaacttttgcgaacttccccagcggatccccagtgtcagcttccacccttgcccgcgccggattcctctacacgggcgagggcgataccgtgcgctgcttctcttgccatgctgccgtggaccggtggcagtatggagacagcgctgtgggcagacacaggaaggtgtcgccgaactgcagattcatcaatggattctacctcgaaaatagcgctactcaatcaaccaactccggcattcagaacggacagtacaaggttgaaaactaccttggttcccgggaccacttcgccttggacagaccgtcagaaacccatgctgactatcttctcagaactggacaagtggtggacatttccgacaccatttacccccgcaatccggccatgtactcggaagaagctcgcctcaagtcgttccagaattggcccgattacgcacatctgaccccgcgcgagctcgcctcggcagggctctactacaccggaattggcgaccaagtgcagtgtttctgctgcggaggtaagctgaagaactgggaaccctgcgacagagcatggagcgaacaccggcgacacttcccgaactgtttcttcgtcctcgggcgcaacctgaatatccgctccgagtctgacgcggtgtcctccgatcgcaacttccctaactcgaccaacctgccccggaatccgtccatggcggactacgaggcgcgcattttcacttttgggacctggatctactcggtcaacaaagagcagctggctagggccggcttttatgctctgggggagggagacaaagtcaaatgcttccattgcgggggaggactcaccgattggaaaccatctgaagatccatgggaacagcatgccaagtggtacccgggatgtaagtacctcctggagcaaaagggacaggagtacatcaacaatatccacctgacccactcactggaagaatgcctggttcgcaccactgaaaaaactccgtcgcttactcgtcggatcgacgacactatctttcagaacccaatggtgcaggaggctatcaggatgggtttctcgttcaaggacatcaagaagatcatggaagaaaagatccagatctcaggctcaaactacaagtccctcgaagtgctcgtggccgaccttgtgaacgcgcaaaaggactcgatgcaggacgagagctcgcagacgtcattgcaaaaagaaatctcgaccgaggaacagctgcggcgcctgcaggaggaaaaactgtgcaaaatctgcatggacagaaacatcgcaattgttttcgtgccttgcggacacctcgtgacttgcaagcagtgcgcggaagcagtggacaaatgcccgatgtgttacactgtgatcaccttcaagcagaaaatctttatgtca

SEQ ID NO: 33799 - DNA, 1491 bp, synthetic construct
  misc_feature 1..1491: note = Description of Artificial Sequence: Synthetic coding sequence
  source 1..1491: mol_type = other DNA
atgacatttaactcattcgaaggcagtaaaacatgtgtcccagccgatattaacaaagaggaagagtttgtcgaagagtttaatcgtttaaagacatttgcaaactttcccagcggatccccagtctccgccagcacgctagcccgggctggctttctgtatactggtgagggagataccgtcagatgcttttcatgccacgcagctgtcgacaggtggcagtatggcgattccgcggtggggcgccatagaaaggtctcccccaattgcagattcatcaacggcttttacttagagaacagcgcgactcagtcaaccaactctggcatccagaatgggcagtacaaggtagagaactatctgggcagtagagaccactttgctctcgaccgcccttccgagacacatgccgattatttgctgagaacaggccaagtagtggacatctcagataccatctatcctcgaaatccagctatgtattcagaagaagcaagactcaaatcttttcagaactggccagattacgcccatctgacacctcgtgagctggccagtgcaggcttgtactacactggcatcggggaccaggtgcagtgcttttgttgcggtggtaaacttaagaactgggaaccctgtgaccgggcttggtctgaacatcgtaggcatttccccaactgcttcttcgtgcttgggagaaacctgaatattagatctgaatctgacgcagtgagtagcgaccgaaacttcccaaactcgaccaatctcccacggaaccctagcatggctgattacgaagctcgtatctttacgttcggtacctggatctattccgtcaacaaggagcaactggcacgcgccggcttctatgccctgggggagggcgacaaggtgaagtgctttcattgtggcggcggcttgacggactggaaaccatcagaggatccatgggagcagcacgcgaaatggtatcccggttgcaagtatctgctagagcagaagggccaggaatatattaataatatccatctaacacactccctggaagaatgcctggtgcggacaacagagaaaacaccatcactaaccagacggattgacgatacgatcttccaaaatcccatggtgcaagaggcaatacggatgggattcagctttaaagatattaagaagattatggaagagaagattcagataagtggaagtaattataaaagtctggaggtgctcgtggccgacctggtcaatgcccaaaaagattcgatgcaagatgagtccagccagacatctctgcagaaggagatctcgacagaggaacaacttaggaggctgcaggaagagaagctgtgtaaaatttgcatggatcgtaatattgccatcgtcttcgtcccctgtggtcaccttgtgacatgtaagcaatgtgccgaggctgttgacaagtgtcccatgtgttacacagtcatcacctttaagcagaagatttttatgagt

SEQ ID NO: 33800 - DNA, 1491 bp, synthetic construct
  misc_feature 1..1491: note = Description of Artificial Sequence: Synthetic coding sequence
  source 1..1491: mol_type = other DNA
atgacctttaactcgtttgaaggttcaaagacgtgtgtccccgcagacataaacaaggaggaagaattcgtcgaagagtttaacaggctcaaaacttttgcaaatttcccttcgggttcacctgtttccgcgtcgacgttggcaagggcaggattcctgtacacgggtgaaggcgacaccgtgaggtgtttctcgtgtcacgccgcggtggaccgctggcagtacggagattcggctgtcggcagacaccggaaggtgtctcctaattgtcggtttatcaatggtttctaccttgagaactccgcaacgcaatcaaccaattccggaatccaaaatggacaatacaaagtcgaaaactaccttggatcgagggaccattttgcactggatcgacccagcgaaacccacgcagactacctgctgcggactggtcaagtggtggacattagcgacactatttaccctcgtaatcccgcaatgtattctgaggaagctcgacttaagagctttcaaaattggcctgattacgcacatctgaccccacgagaactggcctcggcaggtctttactacacgggaatcggagatcaggtgcaatgcttttgttgcggaggtaagctgaagaactgggagccatgcgatagagcctggtccgaacatcgacggcatttcccaaactgttttttcgtgctcggaagaaacctgaacatccgaagcgagtcggatgccgtctcatcagacagaaactttcccaactcaactaatcttccgagaaatccatcgatggcagattacgaggcacggattttcactttcggaacctggatttactccgttaacaaagaacagctggcaagagcaggcttctacgcactcggggagggtgataaggtgaagtgtttccactgtggtggtggcctgaccgattggaagccctcagaagatccgtgggagcagcacgccaaatggtaccctgggtgcaaatatcttcttgagcaaaagggtcaagagtatatcaataacatccatctcacccattcgctcgaagaatgcctcgtccgcactactgagaaaacccccagcttgactagaagaatagatgacacgatctttcagaaccctatggtgcaagaagccattaggatgggctttagctttaaggacataaagaagataatggaggagaaaatacagataagcggttcgaactacaaatcacttgaagtccttgtggcggatcttgtgaacgcacaaaaggactcaatgcaggatgagtcctcacagacctcgttgcagaaggaaatttccaccgaagagcagttgcgcagactccaagaagaaaaactttgtaagatttgcatggacaggaacattgcgattgtttttgtcccttgcggacatctggttacttgtaaacaatgcgctgaagccgtggataagtgtcctatgtgttacaccgtgatcacctttaagcagaagattttcatgtcc

SEQ ID NO: 33801 - DNA, 1491 bp, synthetic construct
  misc_feature 1..1491: note = Description of Artificial Sequence: Synthetic coding sequence
  source 1..1491: mol_type = other DNA
atgacattcaacagcttcgaaggctcaaagacctgtgtgcctgctgacatcaataaggaagaagagttcgttgaagagttcaatcgtctgaagacttttgctaactttccttccggtagcccagttagcgcaagcaccctggccagagcaggctttctgtacactggagaaggtgacactgtccgctgtttcagttgtcatgctgctgtggacaggtggcaatacggcgattctgcagtgggacgccatcgtaaggtgtctccaaactgtaggtttattaacggattctatcttgagaatagtgcaacccagtcaaccaacagtggcatccagaacggtcagtacaaagttgaaaattatttgggctcccgcgaccactttgcattggacaggccctccgaaacccatgcagattacttgcttcgcactggccaggtggtagacatctccgacacaatctacccccgtaatcctgctatgtactctgaggaagctcgtctgaagagtttccaaaattggcccgactacgctcacctgactcctagggagctcgcatccgctggcctctactacactggcattggcgaccaggtgcaatgcttttgttgcggaggcaagcttaagaactgggagccctgcgatcgtgcttggtcagagcatcgccgccatttccctaattgcttcttcgtgctcggccgtaaccttaatatcaggtcagagtcagatgctgtctcctccgaccgtaacttccccaacagtaccaatctgccccgcaacccttccatggccgattacgaggctagaatcttcactttcggaacttggatctatagcgtgaacaaggagcaactggctagagccggattctacgctctcggtgaaggcgacaaggtgaagtgtttccattgcggtggtggcctgacagattggaaaccatccgaagacccctgggaacagcacgcaaaatggtaccccggctgcaaatatctcctggaacagaagggtcaggagtacatcaacaatatccacttgacacatagccttgaagaatgcctggtgcgtacaaccgaaaaaactccttcccttactaggcgcatcgatgatacaattttccagaacccaatggttcaggaggcaatcagaatgggcttctcttttaaggatattaagaagattatggaggaaaagatacagattagtggctctaactacaagagccttgaggtgcttgttgctgatctcgtcaacgcccaaaaagacagcatgcaggatgaaagctcccagacctcactgcagaaggagattagtactgaagagcagttgcgcaggttgcaggaggagaaactgtgcaaaatctgtatggacaggaatatcgcaatcgtcttcgtaccctgcggtcatcttgtgacctgtaaacagtgcgccgaggctgtggacaagtgcccaatgtgttacactgttatcacctttaaacagaaaatcttcatgtca

SEQ ID NO: 33802 - DNA, 1491 bp, synthetic construct
  misc_feature 1..1491: note = Description of Artificial Sequence: Synthetic coding sequence
  source 1..1491: mol_type = other DNA
atgacgttcaacagcttcgaggggtcgaagacctgcgtgcctgcggacattaacaaagaagaagaattcgtggaggagtttaacaggctgaagactttcgctaactttccaagcggctcacctgtgagcgcatccaccttagcccgggctggcttcttgtacacgggagaaggagataccgttaggtgctttagctgccatgccgctgtagatcgatggcagtacggcgactccgcggtgggacggcaccggaaagtgagcccaaactgcaggttcataaacggattctacctggaaaatagcgctacccagagtaccaactcaggaatccaaaacggacagtataaagtcgagaactatctgggaagcagggatcactttgccctcgataggcctagcgaaacacacgccgattatcttcttagaacaggccaagtcgtcgacattagtgataccatctacccacgcaatcctgctatgtactctgaagaagctcggctgaaatcatttcaaaactggccagattatgcccatctgacacctcgagagttggcttctgctgggctctattacacagggattggtgaccaggtccagtgtttttgctgcggcggaaagcttaaaaattgggaaccatgcgatcgggcatggagtgagcaccgacgccactttcctaactgtttttttgttctcggtcgtaacctgaacattaggtctgaatctgacgctgtttcaagtgatcgaaacttcccaaattctacaaacctgcccagaaatccatctatggccgattatgaagcacgaatctttacttttggcacttggatctactctgtaaacaaagagcaactggccagggcagggttttacgctctgggcgagggcgacaaagtgaagtgttttcactgtggcggaggacttaccgattggaagcctagcgaggatccttgggagcaacacgcgaagtggtacccaggatgtaaatatctgctcgaacagaaaggccaggagtatatcaacaacatccacttaactcactcactggaggagtgtctcgtgagaaccacagagaagacacctagcctgacgagaagaatcgatgataccatcttccaaaatcccatggtgcaagaggcaataaggatgggattctcatttaaggatatcaagaagatcatggaggagaagatccaaatcagtgggagcaattacaagagccttgaggtattggtcgccgacctggttaacgcccaaaaagactccatgcaagacgaatccagtcaaacatccttgcagaaggaaatcagcaccgaagagcagcttcggcgcctccaagaggagaagctctgtaagatctgcatggataggaatatcgcgattgtcttcgtaccctgtggtcaccttgtcacctgcaagcagtgtgcagaagctgtggataaatgccccatgtgctatacagtgatcacatttaagcaaaagatctttatgagt

SEQ ID NO: 33803 - DNA, 1491 bp, synthetic construct
  misc_feature 1..1491: note = Description of Artificial Sequence: Synthetic coding sequence
  source 1..1491: mol_type = other DNA
atgacgtttaacagtttcgagggctctaaaacctgcgtccctgccgatatcaacaaggaagaagagttcgtagaggaatttaataggctaaaaactttcgcgaatttccctagcggaagtcctgtttccgccagtacactggctcgcgccggctttctatataccggggaaggagacacagtccggtgttttagctgtcatgccgccgttgatcgatggcagtatggtgacagcgctgtcggccgccataggaaagtcagtcctaactgcaggtttataaacggcttttaccttgaaaacagcgcaacccaatctacaaatagtggaatacagaacggccagtacaaggttgaaaactatctgggaagccgagaccatttcgcactggacaggccatccgagacccatgcagactatttattgaggaccggtcaagtagttgacatcagcgatactatatacccccgtaacccagcaatgtactctgaagaagctcgtctgaagtcgttccagaattggccagactatgcccacctgacacctagagaattggcatcagctggcctttattacaccgggattggagaccaggtacagtgcttttgttgtggaggcaagctgaaaaactgggaaccctgcgatcgggcgtggtccgaacaccgacgacacttcccgaactgtttttttgtgctcgggagaaacctgaacattcggtccgaatcagatgcagtgagctccgaccggaactttcccaacagcacgaacctgcctcgtaacccctccatggccgattatgaggcgcgcatctttacattcggcacgtggatctactcggtcaataaagaacagctagcccgagctggtttctacgcacttggcgagggcgataaagtgaagtgtttccactgtgggggagggctgaccgattggaaaccgtcagaagacccctgggagcagcacgcgaagtggtatcctggatgtaaatatctattggagcaaaagggccaggagtatatcaataatatccatctcacgcattccctagaagaatgtctggtgcggacaaccgagaagactccaagcctaaccagaagaatagatgacaccatctttcaaaatcctatggtgcaggaggcaatccgtatggggttttctttcaaggacattaagaaaatcatggaggagaaaattcagatatcgggaagtaattataagtctctggaggtactagtggccgacctggtgaatgcgcagaaggattccatgcaggatgagtctagccagacatcactccagaaggaaatctcaaccgaggaacagctaagacggctccaggaggaaaagctgtgcaaaatttgtatggatcggaacattgctatcgtctttgtgccatgcggtcatcttgtcacatgtaagcaatgtgctgaggccgttgataagtgtcccatgtgctatacggtcattaccttcaagcagaaaatcttcatgtcg

SEQ ID NO: 33804 - DNA, 1491 bp, synthetic construct
  misc_feature 1..1491: note = Description of Artificial Sequence: Synthetic coding sequence
  source 1..1491: mol_type = other DNA
atgacgttcaactccttcgaaggtagcaaaacgtgcgtgcccgctgatatcaacaaggaggaggagtttgtcgaggagtttaaccggcttaaaacattcgcgaactttcccagcgggagcccggtaagcgcatccaccctcgctagggcaggatttctgtatacaggcgagggggacacagtcaggtgtttcagctgtcacgccgcggtggataggtggcagtacggcgactccgcagtcgggcgccacagaaaggtttctccaaactgccgctttatcaacgggttctacctggagaatagcgcgacacagtccactaatagtgggattcagaacggtcagtataaagtcgaaaattatctcgggtcacgcgatcactttgctcttgataggccgtccgaaacccacgccgactaccttctaaggaccggccaggtcgtggacataagtgataccatatatccccgcaaccctgccatgtatagcgaagaggctagactgaaatctttccagaattggccggactacgctcacctcactcctcgcgagcttgcctcagccggcctctactacaccggcatcggcgatcaggtgcagtgtttctgttgtgggggaaagctgaagaattgggaaccatgcgatcgcgcctggagtgagcatcgcagacacttccccaattgcttctttgtcttgggcaggaatctgaatatcagatcggaatcagatgcggtgagttctgataggaacttccccaattctacgaacctgcctcggaatcctagcatggctgattatgaagccagaatctttaccttcgggacatggatctactccgtcaacaaggaacagctggctagagccggtttttatgccctcggggagggagacaaagttaagtgcttccactgcgggggaggcctcacagactggaagccctcggaagacccatgggagcagcatgctaagtggtatcctggatgtaagtacctgctggaacagaagggacaggagtatattaacaacatacatttgactcattccctcgaggagtgtctagtcagaacaactgagaaaactcccagcctgaccagaaggatcgatgatactatttttcagaacccaatggtccaagaggcaatccgaatgggctttagtttcaaggatatcaagaagatcatggaagagaagattcagattagcgggtcaaactacaagtctctggaggtgctcgtggcggacctggtgaacgcccaaaaagatagcatgcaggatgagagtagtcagactagcctgcagaaggagatcagtactgaggaacaactgcgccgcctgcaggaggaaaaactgtgcaagatatgtatggacagaaacatcgctatcgttttcgtaccatgtggacacctcgtgacctgcaaacagtgtgccgaggcagtcgataagtgtcccatgtgttataccgtgatcactttcaagcagaaaatcttcatgagt

SEQ ID NO: 33805 - DNA, 1491 bp, synthetic construct
  misc_feature 1..1491: note = Description of Artificial Sequence: Synthetic coding sequence
  source 1..1491: mol_type = other DNA
atgaccttcaacagcttcgaggggtccaagacatgcgtcccggctgatataaataaagaagaggagttcgttgaggaatttaaccgactaaaaacttttgccaatttcccttctggatccccagtttcggcgtctaccttagcccgggccggttttctttatactggtgaaggtgatacggtccgttgcttcagctgtcatgctgctgttgaccgatggcaatatggggactcagccgtcggtcgacatagaaaggtatccccgaattgtaggttcattaacgggttttatttggagaactcagcgactcaatccactaactctggcatacaaaatggccagtataaggtcgagaactaccttgggagccgcgaccacttcgctctggacaggcccagcgagactcacgctgattacttgctacgaacaggccaggtcgtggacatttctgatactatctatcctcggaatccggcgatgtactcggaggaggcacgcctaaaaagtttccagaattggccagattatgcccatttaacccctcgggaattggccagtgcaggcctctattacacaggcatcggggaccaggtacagtgcttctgctgcggaggaaagcttaaaaactgggagccgtgcgacagggcttggagtgagcataggagacacttcccgaactgcttcttcgtcttgggcaggaatctcaatattcgtagtgagtcagatgccgtgtcttccgatagaaattttcccaattccaccaacctccccagaaatccgtctatggctgattatgaggctcggattttcaccttcggaacgtggatctacagcgtgaacaaggaacaattagcccgtgccgggttttacgccctcggagagggagataaagtgaagtgtttccattgcggcggtggtcttaccgattggaaaccatccgaagacccttgggagcagcacgctaaatggtaccctgggtgcaagtatctcctcgagcaaaaggggcaggagtatatcaacaatatacatcttacccattccctcgaggagtgtctggtccgtaccactgaaaagactccttccctgacgagaaggatcgacgataccatctttcagaatcccatggtgcaggaagcgatccgtatgggattttccttcaaggatatcaagaaaattatggaggaaaagatccagattagtgggtctaattacaagtccctagaagtgttagtggccgacctcgtcaatgctcagaaggactctatgcaagacgagtcctcccaaaccagtcttcaaaaagagatctccactgaggagcagttgcgacgtttgcaggaagagaagctctgcaagatttgcatggaccggaacatagctatcgtcttcgtgccatgcgggcatctggtgacttgtaaacagtgtgctgaggcagtcgataagtgtcccatgtgctataccgtcatcactttcaaacagaaaatctttatgtct

SEQ ID NO: 33806 - DNA, 1491 bp, synthetic construct
  misc_feature 1..1491: note = Description of Artificial Sequence: Synthetic coding sequence
  source 1..1491: mol_type = other DNA
atgaccttcaattcatttgaaggctctaagacctgcgtgccagctgatatcaataaggaggaagaattcgtggaagagttcaaccggcttaagactttcgccaatttccctagcgggtcgccagtttcggcctcgaccttggcaagagccgggttcctgtacacgggggagggcgatactgtcagatgtttttcctgccacgcggcagtggatcgttggcaatacggcgacagcgcagtgggacgccataggaaggtgtcgcctaactgtagatttatcaatggattttacttggaaaattcggcgactcaatcgacgaattcgggaatccaaaacggtcagtacaaagtggaaaactatcttggttcacgggatcattttgctctggatcggccctccgaaacccatgccgattacctgctgcgcactgggcaggtggtggatattagcgatactatttacccgaggaatcctgcaatgtacagcgaggaggcacggcttaaatcgtttcaaaactggcctgactacgcacatctgactccaagagaactggcctcggccggtttgtactacactgggattggtgaccaggtgcaatgtttttgttgcggtggcaagctcaagaattgggaaccatgcgacagagcatggtcagagcatcgccgtcatttcccaaattgcttttttgtgctgggacgaaacctgaacattcggtcggaatcggacgcagtgtcctccgatcgcaatttcccaaatagcaccaacctgccaaggaatccttcgatggcagattacgaagcgaggatattcacttttggaacctggatttactcagtcaataaggagcaactggcgcgggcaggattctacgcactcggtgaaggcgacaaggtcaagtgcttccactgtggaggaggattgaccgactggaagccaagcgaagatccttgggaacagcatgcaaagtggtaccctggatgtaagtacctgcttgagcagaagggccaggaatacatcaataacattcatctgactcacagccttgaggagtgtctcgtgcgcaccaccgagaaaactccttcacttactcgccggattgatgacactattttccaaaaccccatggtgcaagaggcaatcagaatgggcttttcgttcaaggatatcaagaagattatggaagagaagattcaaatttcgggttcgaactacaagtcactggaagtcctggtggcggatctcgtgaatgcccaaaaggattcaatgcaagacgaatcatcacaaacgtcgctccaaaaggaaatctccaccgaggagcagcttcgtcgccttcaggaagagaagctctgtaagatttgtatggatagaaacattgcaattgtgtttgtgccatgtggacaccttgtgacctgcaaacaatgtgcagaggcagtggataagtgcccgatgtgctacaccgtgattacttttaagcaaaagatattcatgtcc

SEQ ID NO: 33807 - DNA, 1491 bp, synthetic construct
  misc_feature 1..1491: note = Description of Artificial Sequence: Synthetic coding sequence
  source 1..1491: mol_type = other DNA
atgacgtttaactctttcgaaggatccaagacctgtgtgcctgcagacatcaataaagaagaagaatttgtggaggagttcaaccggctcaagacttttgcaaactttccctctggatcccctgtctcagcatcgacccttgcccgagcgggattcctttacactggagagggagataccgtcaggtgcttctcatgtcatgccgccgttgacagatggcaatacggtgacagcgccgtgggacgccaccgcaaagtctcacccaattgccgatttatcaacggattttacctggaaaattcagcgacccagtccacgaattccggaatccagaatggccaatacaaggtggaaaactatctgggctcaagggaccactttgcgctggatcgcccatcggaaacccacgcagattacctgcttcggaccggtcaggtggtcgatatcagcgatactatctaccctcgaaaccctgctatgtattcagaagaagcccgtcttaagagcttccaaaactggccagattacgcgcatctgactccccgtgagcttgcatcagcaggcctgtactacactggcattggtgaccaggtgcaatgcttctgttgtggaggcaaactgaagaattgggaaccttgtgaccgcgcatggtcagaacacaggaggcattttcctaattgtttctttgtgcttggtcgtaacctcaacatcaggtccgaatccgatgccgtgtcatcagataggaactttccgaacagcacgaacctcccgcgtaacccatctatggccgattatgaggcacggatattcacctttggaacgtggatttacagcgtgaacaaggagcaactggcacgcgcaggtttttacgcactcggagaaggagataaggtcaagtgtttccactgcggaggcggtctgactgattggaaaccctccgaagatccatgggagcagcatgcaaagtggtaccctgggtgcaaatacctgcttgagcagaagggacaagagtacataaacaatattcatctcactcatagtcttgaagagtgtctggtccgcaccaccgaaaaaactccatcccttactaggaggatagatgacaccatattccaaaacccgatggtgcaagaagcaatccgcatgggcttttccttcaaggatatcaagaagattatggaagaaaagattcaaatttcagggtcgaactacaaatccttggaagttcttgtggctgatttggtgaacgctcaaaaagactcgatgcaggatgagtcgtcccagacttcactccaaaaggagatttcgaccgaggagcaacttcggaggctgcaggaagaaaagctgtgcaagatatgcatggaccgcaacatcgctattgtttttgtaccatgtggtcatcttgtgacttgtaagcagtgtgcggaggcagtggacaagtgcccaatgtgttacaccgtgatcacttttaagcaaaagatctttatgtcc

SEQ ID NO: 33808 - DNA, 1491 bp, synthetic construct
  misc_feature 1..1491: note = Description of Artificial Sequence: Synthetic coding sequence
  source 1..1491: mol_type = other DNA
atgacctttaacagtttcgaaggttccaagacttgtgtgccagcagatatcaacaaagaagaggagtttgtggaagagtttaatcgactgaaaacttttgcgaacttcccatccgggagccctgtgtcggcatccaccctcgcaagagcggggtttctctacactggagagggagataccgtgagatgcttctcatgccatgccgctgtggatcgttggcaatatggagattcagctgtgggtcgccataggaaggtgtcgccaaactgtagattcattaatggtttttacctggaaaactcggcaactcagagcaccaactcagggatacaaaacggccagtacaaggtggaaaactatcttggctccagagatcactttgccctggaccggccatcggaaacccatgccgattacctgctccgcaccggacaggtcgtggatatctccgatactatctaccctaggaacccagccatgtactccgaagaagcaagactgaagtcgttccagaactggcctgattacgcacacctgactcctcgtgaactcgcgtccgcaggactttactacaccggcattggtgatcaggtgcaatgtttttgttgtggtgggaagctgaagaactgggaaccttgtgatcgggcatggtcggaacatcgcagacactttcctaattgtttctttgtcctcggccgcaacctgaatattcgttcggaatccgatgccgtgtctagcgaccggaactttcccaacagcactaaccttccccggaaccctagcatggcggattacgaagcccgcattttcacttttgggacctggatttactcagtgaacaaagaacagctggcacgggcgggattctacgcactgggggaaggggataaggtgaagtgttttcactgcgggggcggtctgaccgattggaaaccttccgaggacccttgggaacagcatgcgaagtggtaccctggttgcaagtacctcttggaacaaaaggggcaggaatacatcaacaatattcatcttacccattcgttggaagaatgtctggtgcggaccactgaaaagaccccttcacttacgaggcgaattgacgataccatctttcagaacccaatggtccaagaagcaattagaatggggtttagcttcaaggacattaagaagatcatggaggaaaagatccaaatttccggatcgaactacaaaagccttgaagtgcttgtggcagatcttgtgaacgcccagaaggattccatgcaagatgaatcctcgcaaactagcctccaaaaggaaatctcaaccgaagaacaactgcgccgattgcaagaggaaaaactgtgtaagatatgtatggatagaaacatcgccatcgtctttgtgccttgtggccatctggtcacgtgtaagcagtgtgctgaagcagttgacaaatgcccaatgtgctatactgtgataacgttcaaacaaaagatcttcatgtcc

SEQ ID NO: 33809 - DNA, 1491 bp, synthetic construct
  misc_feature 1..1491: note = Description of Artificial Sequence: Synthetic coding sequence
  source 1..1491: mol_type = other DNA
atgaccttcaattcgttcgagggctcgaaaacgtgcgtgccggcggacatcaacaaggaggaggaattcgtcgaagagtttaacagactgaaaacgttcgccaacttcccatcgggtagcccggtgtccgcctcgacgctcgcgcgcgctggattcctgtacactggcgagggagacactgtgaggtgtttctcgtgccatgccgcggtcgaccggtggcaatacggcgactcagccgttggacgccacagaaaagtgtcaccaaactgccgcttcataaacggattttacctcgagaactccgccactcagagcactaatagcgggatacagaatgggcagtacaaggtcgaaaactatctcggatcgagagatcattttgcgctggaccgcccgtcggaaacgcacgcagactaccttttgcgcactggccaggtggtcgacatctcggatactatctacccacgcaatccagcgatgtattcagaagaagccaggctgaagtccttccaaaactggccggactatgcccatttgaccccaagagaacttgcttccgccgggctgtactacaccgggatcggcgatcaggtccagtgcttctgctgtggagggaagctgaagaattgggaaccctgtgatagagcatggtcagagcacagacgccattttccgaactgctttttcgtgctcgggcggaacctcaacattcggtcagagagcgacgctgtgagcagcgaccgcaacttcccgaactccaccaatctccctcgcaatccatccatggcagattacgaagcaagaatcttcactttcggcacctggatttactcggttaacaaggagcagcttgctagagccgggttctacgctctgggagaaggcgataaggtgaagtgttttcattgcggcggcggcctcaccgactggaaaccatcagaggacccgtgggaacagcacgcaaagtggtaccctggctgcaaatacctgctggagcagaagggacaggaatacatcaacaatatccacttgacgcactcactcgaggagtgcctggtgaggactactgagaaaactccgtccctcacccgtagaattgacgacaccatctttcagaatccgatggtccaggaagcaataagaatgggtttttcgttcaaggacatcaagaagattatggaggaaaagatccagatttctggatcgaactacaagtccctcgaggtgctcgtggctgacttggtcaacgctcaaaaagattccatgcaggatgaatccagccaaactagccttcagaaggaaatctccaccgaagagcaactgagacgcctgcaagaggaaaagctgtgcaaaatctgcatggatcggaacatcgccatcgtgttcgtcccctgcggacacctggtgacttgtaagcaatgtgccgaagccgtggataagtgcccgatgtgctacaccgtgatcacgtttaaacaaaagatcttcatgtca

SEQ ID NO: 33810 - DNA, 1491 bp, synthetic construct
  misc_feature 1..1491: note = Description of Artificial Sequence: Synthetic coding sequence
  source 1..1491: mol_type = other DNA
atgacctttaactcttttgagggaagtaagacctgtgtccctgcagatatcaacaaggaagaggagttcgtcgaggagtttaatcggcttaagacctttgccaacttcccttccggatcacccgtgtccgcaagtacgttggctagagcaggattcctgtacacgggagaaggagacactgtgcggtgtttctcatgccatgcagccgtcgatcgatggcaatacggtgattcggcagtggggcgtcatcgcaaagtgtcccccaactgtcgcttcataaacggtttttaccttgagaactcagcaacgcaatcgacgaatagcggcattcaaaacggccagtacaaggtggagaattacttgggttccagagatcatttcgccctggatcgcccttcggaaacccatgccgattacctgctgaggactggacaagtggtcgacattagcgataccatctacccgcggaacccagcgatgtactcggaagaggctcggctgaagtcctttcagaactggcccgactacgcccatctcacccctcgcgagcttgccagcgcgggtctgtactacaccgggattggtgaccaggtacagtgtttctgctgcgggggaaagctcaagaactgggagccttgtgatagagcatggtccgagcataggagacacttcccaaactgcttttttgttttgggccgtaatcttaacattagaagcgaatccgacgcagtgtcatcggatagaaactttccaaattccaccaacctgcctagaaacccaagcatggcagactacgaagcacgaatctttacgtttggcacctggatatactccgtgaataaagaacagcttgcacgggcaggtttttacgcacttggagagggagacaaggtcaagtgtttccattgtggtggaggactgacggattggaagccatcggaagatccatgggaacaacacgcaaaatggtaccccgggtgtaagtacctgcttgaacagaagggacaagaatacattaacaacattcatctgacgcattcgctcgaagaatgccttgtgcgcaccaccgagaaaaccccttcactcactcgtagaattgatgatactatctttcaaaacccgatggtccaggaagctattcgcatgggattctcatttaaggacatcaagaaaatcatggaggaaaagatccagatttccggttcgaattacaaatcactcgaagtgctcgtcgctgatctggtgaacgcccaaaaagactcaatgcaggatgaaagcagtcaaacctcgctgcagaaggaaatttctactgaagaacagctgcgcaggctgcaagaggaaaagctgtgtaagatttgtatggaccgaaacattgcaatcgtgtttgtgccctgtggtcacctggtgacctgtaagcaatgtgcagaagccgtggacaagtgtccaatgtgctacaccgtgatcacctttaagcagaaaatctttatgtcc

SEQ ID NO: 33811 - DNA, 1491 bp, synthetic construct
  misc_feature 1..1491: note = Description of Artificial Sequence: Synthetic coding sequence
  source 1..1491: mol_type = other DNA
atgacttttaactcttttgaagggtccaagacgtgcgtgccagctgacatcaacaaagaagaggaatttgtggaggagttcaatagactgaaaacttttgctaatttcccttctggctcacccgtgagcgctagcactctggctcgagctggattcttgtacacaggcgagggtgataccgtgcggtgctttagttgccatgccgcggtggatagatggcagtatggagactctgcagttggacgacaccggaaagttagccctaattgtaggtttatcaacggcttttaccttgaaaactcagccactcaatctacaaatagcggaattcagaacggccaatacaaagtggagaattacctaggatctcgggatcattttgctctcgacagaccttccgaaacgcacgcagattatctccttagaacaggtcaggttgtggatatttctgatacaatctatccaaggaaccccgcaatgtatagcgaggaggccagattgaagtcttttcagaactggcccgattacgcgcacttgacgccacgggaactggctagcgctggtctatattacacgggcataggcgaccaggtccagtgtttctgttgtggcggaaaactgaaaaactgggaaccctgtgaccgtgcttggtcagagcatcggagacacttcccgaactgtttttttgtcctgggccggaacctaaacattcgctccgaatctgatgcagtgagtagcgataggaactttcccaattcgactaatcttcccaggaacccatctatggcagactatgaagctcgcatcttcacctttggaacttggatctattcagtgaacaaagaacagctggcaagagccggcttctacgcgctcggagagggcgacaaggtgaaatgttttcactgcggcgggggcctgactgactggaagccctcggaagacccttgggaacaacacgccaaatggtatcccggctgcaaatacctactcgaacaaaaggggcaggagtatattaataacattcatctgactcattccctagaagagtgcttagttcggacgactgagaaaacgccatccctgacgagaaggattgacgatacgatttttcaaaatcccatggtgcaggaggcaatccgcatgggcttctccttcaaggacattaaaaaaatcatggaagagaaaattcagatcagcggcagtaattacaagagtttagaagtactagtggccgatctcgtaaacgcacagaaggatagtatgcaagacgagtcatcccagaccagcttacagaaagagatttctaccgaagaacagctgaggcgcctgcaggaggaaaagctttgcaaaatttgcatggatcggaacatagcaattgtgtttgtgccttgtgggcatctggtcacctgtaagcaatgcgctgaggctgtagataaatgtcctatgtgttatacagtgatcacattcaaacagaaaattttcatgagc

SEQ ID NO: 33812 - DNA, 1491 bp, synthetic construct
  misc_feature 1..1491: note = Description of Artificial Sequence: Synthetic coding sequence
  source 1..1491: mol_type = other DNA
atgacatttaactcctttgagggctccaaaacatgcgttcctgcagatatcaataaagaggaagaatttgtcgaggaatttaacaggctgaagacctttgccaacttcccttctggaagcccagtctctgcgagtacattggccagagctggctttctgtacacaggagagggagataccgtgcgctgcttctcctgccatgccgccgttgaccgctggcagtacggcgactctgcagtcggtaggcataggaaggtgagtccaaactgcagattcataaatggtttctacctcgagaactctgccactcagagcacaaactcaggtatacaaaatggtcagtacaaagtagaaaactacctgggctcccgcgatcactttgccctggaccgcccgtccgaaacacacgccgactacctgttgagaactggtcaagtggtggatatcagtgatactatctatcctcgcaacccggctatgtattcagaggaagctcgcctgaagtccttccagaattggccagactacgcgcatcttacgccccgcgaactcgcttctgcgggcctctactataccggtattggtgatcaggtgcaatgtttctgttgtggaggcaagctcaaaaactgggagccctgtgatcgcgcatggagtgaacacagacgccacttccctaattgcttttttgtgttgggcagaaaccttaacattcgctctgaaagtgatgctgtgagttctgacaggaactttcctaacagtaccaacctcccacgcaacccctctatggcagactatgaagcgagaatcttcacttttggaacttggatttacagtgtcaacaaggagcaactggccagagctggattctacgcactgggtgagggtgataaggtcaagtgctttcactgcggcggtggactgacggattggaaacccagtgaagatccctgggagcagcatgctaagtggtatcccggctgcaagtacttgctggagcaaaagggccaggagtatatcaataacatacaccttacccattccttggaagagtgcctggtgagaacaacggaaaaaactccctctctgacccgcaggattgacgacacgatcttccagaaccccatggtgcaggaggccatcaggatgggattctcctttaaagacatcaagaagatcatggaggaaaagattcagattagtggttctaactataagtctttggaagtactcgtggcagacttggtgaacgcgcagaaggacagcatgcaagatgagtcatcccaaacgtccctgcagaaggagatttccacagaagagcagctgaggagattgcaagaggaaaagctgtgcaagatttgcatggatagaaacatcgcgatagtgttcgtcccgtgcggccacctggtgacatgtaagcagtgcgctgaggccgtagataagtgcccaatgtgttacactgtgatcacgttcaagcaaaagatatttatgtca

SEQ ID NO: 33813 - DNA, 1491 bp, synthetic construct
  misc_feature 1..1491: note = Description of Artificial Sequence: Synthetic coding sequence
  source 1..1491: mol_type = other DNA
atgacgttcaactcgtttgagggatcgaaaacttgcgtgcctgcagatatcaacaaggaagaggaatttgtggaggaattcaatcgactcaagactttcgcgaatttcccctcgggctcaccggtgtcagctagtaccctcgcgcgggccgggtttctctacactggagagggtgataccgtgagatgtttttcgtgtcatgcagcagtagatcggtggcagtacggagattcagcagtgggaaggcataggaaggtgtccccaaattgccgttttatcaacggattttacctggagaattcagcaacccagtcgactaattcgggaattcaaaacggacaatacaaggtcgagaactacctcggctcccgggatcattttgcactcgatagaccgtccgaaactcatgcagattacctccttcggaccggccaggttgtagacatcagcgatactatctacccccggaacccagcaatgtacagcgaagaagccagactgaagtcatttcagaattggcctgattatgcacatcttactccaagagagctggcatccgctggcttgtactacaccgggataggtgaccaagtgcagtgcttctgttgcggaggaaaactgaagaattgggaaccttgtgacagggcgtggtctgagcacaggaggcactttccaaactgcttttttgtgcttggcagaaacctcaacatacggagcgagtccgatgctgtctcctcggatagaaactttccaaatagcactaaccttcctagaaatccgtccatggccgattacgaagcacgcattttcacctttggaacttggatctattcggtgaacaaggaacaactggcgcgagcgggattctacgcattgggggaaggtgacaaggtgaagtgctttcattgtggtggtgggctgactgattggaagccatccgaagatccatgggaacagcatgcgaagtggtaccctggctgtaaatacctgctggaacagaaggggcaagagtacattaacaatattcatctcacgcattccctggaagagtgtctggtgagaaccaccgaaaaaacgcccagcctcacccgacgcatagatgataccattttccagaaccctatggtccaagaagccatacgaatgggtttctccttcaaagacatcaagaaaatcatggaggagaagattcaaatctccggttcgaactacaaatcgttggaggtcctcgtggccgacctggtgaacgcccagaaggattcgatgcaagatgaatcatcgcaaaccagcttgcaaaaggaaatttcgaccgaagaacagctccgccgattgcaagaggaaaaactgtgcaagatctgtatggaccggaatattgctatcgtctttgtcccatgtggacatctggtgacgtgtaaacagtgcgccgaagcagtggacaagtgtccaatgtgttacaccgtgattacgtttaaacaaaagattttcatgtcc

SEQ ID NO: 33814 - DNA, 1491 bp, synthetic construct
  misc_feature 1..1491: note = Description of Artificial Sequence: Synthetic coding sequence
  source 1..1491: mol_type = other DNA
atgaccttcaactcgtttgaaggttcgaagacctgcgtgccggccgacattaacaaggaggaggaattcgtggaggagtttaataggctcaagaccttcgccaacttcccgtcaggctcaccggtgtcagcgtcgaccctggcacgcgcaggattcctttacactggcgagggagacaccgtgcgatgcttcagctgtcacgccgccgtggatcggtggcagtatggagacagcgccgtgggtagacacagaaaagtctcaccgaattgcaggttcatcaacggtttttacctcgaaaatagcgcgactcagagcaccaactccgggatccagaatgggcaatacaaagtggaaaactacctgggatcacgcgaccacttcgcgctcgacagaccgtccgaaactcacgccgactacctgttgcggaccggacaagtcgtagacatcagcgacactatctatccgaggaacccagccatgtactcagaagaggctcggctgaagtcatttcaaaattggcccgactacgcgcacttgactccacgcgagctggcttccgcaggcctctactataccggcattggcgaccaagtgcagtgcttctgttgcggaggaaagctgaagaactgggagccttgcgaccgggcttggtcagagcacagacggcatttcccaaactgcttctttgtgctcggccgcaacttgaatattcggtccgagtcggatgcggtttccagtgacaggaatttccctaactcgaccaacttgccgagaaacccatcaatggcagactacgaagcgaggatcttcaccttcgggacttggatctactccgttaacaaagagcaactcgcgagagctggattctacgcgttgggagaaggagataaggtgaagtgctttcactgcggaggtggactgaccgattggaaaccttccgaggatccttgggaacagcatgctaaatggtaccccggctgcaagtatttgctggagcaaaaagggcaggagtacatcaacaatattcaccttactcactccctggaggaatgccttgtgcgcacgaccgaaaagaccccaagcctgactcggcgaatcgacgatactatattccagaacccgatggtccaggaggcaattcgaatgggattctccttcaaggatatcaaaaagatcatggaagaaaagatccagatctcgggaagcaactacaaatccctggaggtgctggttgccgatctcgttaacgcccaaaaggacagcatgcaggacgaatcctcccaaacctccctgcagaaggaaatttccaccgaggaacagttgagacggctgcaggaagagaagttgtgcaagatctgtatggatcgcaatatcgcgatcgtgtttgtgccatgtggccacctcgtgacctgcaagcaatgtgccgaagcggtcgacaagtgccctatgtgctatacggtcatcactttcaagcagaagatcttcatgtcc

SEQ ID NO: 33815 - DNA, 1491 bp, synthetic construct
  misc_feature 1..1491: note = Description of Artificial Sequence: Synthetic coding sequence
  source 1..1491: mol_type = other DNA
atgactttcaattcatttgagggttcgaaaacttgtgtgccggctgatatcaacaaagaagaagagttcgtggaggaattcaacaggttgaaaacgttcgcgaacttcccctcaggatcgcctgtgagcgcctcaacgctcgccagagcagggtttctctacaccggagaaggagacactgtgcgctgcttctcgtgccacgccgctgtcgaccgctggcaatacggagattctgcagtgggccgccatcgcaaagtctccccgaactgccgatttatcaatggcttttacctggagaactccgctacgcagtcgactaattcgggtatccagaatggccagtataaggtagaaaactatctcgggtcccgcgaccattttgcactggataggccttccgaaacccacgctgactatctgctgcgcactggccaagtcgtcgacatctcggacactatctatccgagaaacccggctatgtacagcgaagaagcccgactcaagagcttccaaaattggcctgactacgcccatttgaccccccgcgaattggcgagcgcaggactgtactataccgggatcggggatcaggtccaatgtttctgctgtggtggcaagctgaagaactgggagccatgcgaccgcgcctggtccgaacaccgccgccacttcccgaactgcttctttgtgctgggtagaaacctgaatatccggagcgagtccgatgccgtttcctcagacaggaacttcccgaattccaccaacctgccccggaacccatcaatggccgactacgaggcacgcatcttcaccttcggtacctggatttactcggtcaataaagagcaactggcacgggctggattctacgcgctcggagagggggataaggtgaaatgtttccattgcggtggtggactcactgactggaaaccgagcgaagatccgtgggaacagcacgcaaagtggtacccgggatgcaaatacctccttgaacaaaagggccaagaatacatcaacaacattcatctgactcattcgctggaagagtgtctcgtgagaactactgagaaaacccccagcctgacccggcgcatcgatgacacgatcttccaaaacccgatggtgcaggaagcaatccggatgggtttcagcttcaaggacatcaaaaagattatggaagaaaagatccaaatctccgggagcaactacaagagcctggaagtgctggtggcagatctggtcaacgcccaaaaagattcgatgcaagatgaaagctcccagacctccctccagaaggagatatcaacggaggaacagctgcggcggctgcaggaagagaaactttgcaagatctgcatggatagaaatatcgcgattgtgttcgtcccgtgcggacacctggtgacttgtaagcagtgcgccgaagctgtggacaagtgccctatgtgctacaccgttatcacctttaaacaaaagatcttcatgtcc

SEQ ID NO: 33816 - DNA, 1491 bp, synthetic construct
  misc_feature 1..1491: note = Description of Artificial Sequence: Synthetic coding sequence
  source 1..1491: mol_type = other DNA
atgacctttaattcttttgaggggagcaagacgtgtgtgcctgcagacataaataaagaggaagagtttgtggaagaatttaatagactcaaaaccttcgcgaacttcccctctggctcgcccgtttcagcatctacattggctcgagccggctttctgtatactggtgagggcgatacagtgcggtgcttcagctgccacgctgccgttgacagatggcagtacggggattccgcagttggacggcacaggaaggtctcacccaattgtcgttttatcaatgggttctatttggagaattccgcgacacaaagtaccaattcaggaattcagaacggccagtataaggtcgaaaattacctgggaagcagggaccattttgccctggaccgtccttcggagacgcacgcagattatctgctgaggacaggccaggtggtggatatttcagatacaatttaccctagaaaccccgctatgtactctgaagaggctcgactgaaatcatttcagaactggcccgattacgctcatctgacccctcgggaactggcatctgccggcctctattacaccggtatcggagatcaggtccaatgtttttgctgcggtggaaagcttaagaactgggaaccttgcgacagggcctggtccgaacataggaggcacttcccaaactgcttttttgtcttaggccgcaacctgaacatccgaagtgagtccgacgctgtgtcaagcgacaggaactttccaaactcaaccaatctgccccgcaatcccagcatggccgattacgaggctagaatcttcacctttgggacctggatttactctgtgaacaaagagcagctggcaagagcgggcttctatgccctgggagagggcgataaggtgaagtgtttccactgcggtggtggattgactgactggaagccttccgaagatccatgggagcagcatgcaaaatggtatcccggctgtaagtatctgctcgagcagaaagggcaagaatacatcaacaatatccatctaacacattccctggaggagtgtctagtgcgaacgacagaaaagactccttcacttacaaggagaatcgatgacactatcttccagaatccaatggtgcaggaagctatacggatgggcttttctttcaaggacatcaaaaagatcatggaggagaagattcaaatttccggatccaattacaagagcctagaggtgctggtggcagacctagtgaacgctcaaaaggacagcatgcaagatgaaagtagtcagacctcgctccaaaaggaaatcagcaccgaggagcaactgcggcgactgcaagaagaaaaactgtgtaagatctgtatggatcggaacatcgcaatcgtttttgtgccatgtgggcacctggtcacgtgtaaacagtgtgccgaggccgtagacaaatgtcctatgtgctataccgtgatcacgttcaagcaaaagatattcatgagc

SEQ ID NO: 33817 - DNA, 1491 bp, synthetic construct
  misc_feature 1..1491: note = Description of Artificial Sequence: Synthetic coding sequence
  source 1..1491: mol_type = other DNA
atgacctttaactcctttgagggaagtaagacctgcgtgcccgctgacatcaataaagaggaagaattcgtggaggagtttaataggctgaaaaccttcgctaattttccatccggtagccctgtctcagcgagcaccctcgcccgcgctggatttttgtacacgggtgagggcgatactgtgcggtgcttctcctgccacgccgccgtcgatagatggcagtatggagactcggccgtgggacgtcatcggaaagtttcccccaattgccggtttatcaacggattctacctagagaactcagccacccagtctaccaactcaggcatccaaaacggccagtacaaagttgagaattacctcggctccagggaccatttcgcgctcgacagaccaagtgaaacgcacgccgactacctcctcaggacagggcaggtggtggacatttccgacacgatctatcctcggaacccggcgatgtacagcgaggaggctcggcttaaatcctttcagaactggcctgattatgctcatttgacccctcgagagctggcctctgctggcctgtattatactgggataggcgaccaggtgcaatgcttctgctgtggtggtaagctcaagaattgggaaccatgtgaccgcgcgtggagtgagcaccgccgacattttcccaattgctttttcgtccttggtcgcaatcttaacatcagatctgagtccgacgcagtttcctcagaccgcaatttcccgaatagcaccaacttgccgcggaatcctagcatggcggactacgaggcacgcatcttcacattcggaacttggatttactcagtgaataaggagcagctggcaagagcaggcttctacgcactgggcgaaggcgacaaagtgaagtgcttccactgcggcggcggtctcactgactggaaaccttcagaagatccatgggaacagcacgctaaatggtaccccgggtgtaaatacctgttggaacaaaagggacaggagtatataaataatatccatctgacgcactccctagaagaatgcctcgtgcgaaccactgagaagaccccctcactcacacgacgcatcgatgacaccatctttcagaaccccatggtgcaggaggccattaggatggggttctcattcaaggacataaaaaaaatcatggaggaaaagatccagatctctgggtccaattacaagtctttggaggtgctggtggccgatctggtgaacgcacagaaggacagtatgcaggacgaatctagccaaaccagcctgcagaaggaaatctctacagaggaacaactgaggcggctgcaggaggagaagctctgtaagatttgcatggacagaaacatcgctatagtgtttgtgccgtgcggacatctggtcacttgtaagcagtgcgctgaggccgttgataaatgccctatgtgttacactgtcatcacttttaagcagaaaatctttatgtcc

SEQ ID NO: 33818 - DNA, 1491 bp, synthetic construct
  misc_feature 1..1491: note = Description of Artificial Sequence: Synthetic coding sequence
  source 1..1491: mol_type = other DNA
atgaccttcaactcgttcgaaggctcaaagacctgcgtgccagcagatatcaataaggaagaagagttcgtggaagaattcaacagacttaagacttttgctaactttccttccggatcaccagtgtcggcgagcactctggctcgggcaggattcctgtacaccggggaaggagatactgtccggtgcttctcatgccatgcagcagtggacaggtggcaatacggggatagcgcagtcggacgccaccgcaaggtgagccccaattgtcgctttatcaacggattctacctcgagaactcagccacccaaagcaccaactcaggtattcagaacggacaatacaaagtggagaactacctcggctcacgcgaccactttgcgctcgaccggccctcggaaacccacgcggattacctgctccgcactggacaagtggtggacatctcagacaccatctacccgcggaacccagccatgtacagcgaagaagcccggctgaagtcctttcagaattggccagactatgcccacctgacgcctcgcgagctggcatcggccgggctgtactacactggcatcggggaccaagtgcaatgcttttgctgcggcggcaagctcaagaactgggaaccatgtgatagagcgtggtcggaacaccgccggcacttcccaaactgcttcttcgtcttgggacgcaatctcaatatccggagcgaaagcgacgctgtctcgtcggacagaaacttcccgaatagcactaacctcccgagaaacccgtcaatggccgactatgaggcacgcatcttcacctttggtacttggatttacagcgtgaacaaagaacaactggcccgcgctggtttttacgcattgggtgaaggagataaggtgaaatgttttcactgcggtggaggccttaccgactggaagccttccgaagatccgtgggagcaacacgccaagtggtacccgggttgtaagtaccttctggaacagaagggccaagagtacatcaacaacatacatctgacccactctctcgaagaatgcctcgtgaggaccaccgagaaaacgccgtcactgactcgacggattgatgatactatcttccagaatccaatggtccaggaggccatccgcatgggattctcattcaaagacattaagaagattatggaggaaaagatccagatttcgggaagcaactacaaatccttggaagtcctcgtcgcagacctcgtgaacgcacagaaggattccatgcaggatgagtccagccagacttcgctgcagaaagaaatctcaactgaggagcagttgcggagactgcaggaagaaaaactgtgcaagatctgtatggaccggaacatcgccatcgttttcgttccgtgtggacatctggttacttgcaaacagtgcgctgaagcggtggacaagtgcccaatgtgttacaccgtgattacctttaaacagaagatcttcatgtcg

SEQ ID NO: 33819 - DNA, 1491 bp, synthetic construct
  misc_feature 1..1491: note = Description of Artificial Sequence: Synthetic coding sequence
  source 1..1491: mol_type = other DNA
atgaccttcaattccttcgaggggtccaaaacatgcgttccagccgacatcaataaagaggaggaatttgtagaggaatttaaccggctgaaaacgttcgctaattttccatctggctcacccgtgtcggcatcaacactcgcacgggctggcttcttgtacaccggagagggtgacactgtgaggtgcttctcttgccacgccgccgtggatcggtggcagtatggcgattccgcagttggtcgccaccgcaaggtcagcccaaactgtagattcatcaacgggttttatttggagaacagtgccacccagtccaccaattctggaatccagaatggtcagtataaagtggagaattacctgggatccagagatcattttgctttggatcgaccctctgaaacgcatgccgactatttgctgcggactggtcaggtggtggacatttccgatactatttatccccgaaacccagctatgtatagcgaggaagcacgcctgaagtcctttcagaattggcctgattacgctcatctgactccccgagaactggcttctgctggactgtattacaccgggatcggtgaccaggtgcagtgtttttgttgtggcggcaaactcaaaaattgggagccctgtgacagagcttggagtgagcatcgccgccacttccccaattgcttctttgtacttggccgcaacttaaacattcggtccgagtccgatgcagtgtcctccgataggaactttccaaactccactaatctacctcgtaatcctagcatggccgactatgaagcgagaattttcacttttggcacctggatttattccgtgaacaaggaacagcttgcccgcgcggggttttatgcactcggcgagggcgacaaggtaaagtgtttccattgcggaggtggactgactgattggaaaccctctgaagacccttgggagcagcatgcaaagtggtaccccgggtgtaaatacttactggaacagaagggccaggaatatatcaataatatccatttaacccacagtttggaggagtgcctcgtaagaactacagaaaagacaccttccttaactcgcaggattgatgataccatcttccagaatcctatggtgcaagaagcaatccgcatgggcttctcctttaaagatattaaaaaaatcatggaggagaagatacaaatttcaggtagtaattacaagtcactggaagtgctggtcgcagacctagtgaacgcccagaaggattcaatgcaggacgagtcttcccagacatcgctccagaaggaaatttccactgaggagcagctgcgaagactgcaggaagaaaaactgtgcaaaatatgtatggatcgtaatatagccattgttttcgttccttgcggccatctggtaacctgcaaacagtgcgccgaggccgtagataagtgtcccatgtgttacacagttattacatttaagcagaagatttttatgtct

SEQ ID NO: 33820 - DNA, 1491 bp, synthetic construct
  misc_feature 1..1491: note = Description of Artificial Sequence: Synthetic coding sequence
  source 1..1491: mol_type = other DNA
atgaccttcaactcgttcgaaggatccaagacctgcgtgcccgccgatatcaacaaggaagaagagtttgtcgaagaattcaaccgcctgaaaacgttcgcaaacttcccgtcaggatcgcctgtctccgcgagcacccttgctcgtgcaggatttctgtacactggagaaggagacaccgtgcggtgttttagctgccatgccgcggtggaccggtggcaatacggggacagcgccgttggccgccatcgcaaggtgagcccgaattgcagatttatcaatggattctacttggagaacagcgcaacccagagcactaattccggtattcagaacggacagtacaaggttgagaactacctcggatcgcgggaccacttcgccctggaccggccttccgaaactcacgcggactacctcctcagaactggccaggtggtggacatcagcgatactatctacccgagaaatcctgccatgtacagcgaggaggcccgcctgaagtcattccagaactggcctgactacgcccaccttactccgagagaactcgcaagcgccggcctctactacactggaatcggtgaccaagtgcagtgtttttgctgtggaggaaagctgaagaactgggagccgtgtgacagagcgtggtccgaacaccgccgccactttccaaattgcttctttgtgctgggtcgcaacctgaacatccggtcggagtcagacgcggtgtcgtccgaccggaacttcccgaactcaaccaatctccccaggaatccatcaatggcggactacgaggcgcggatcttcactttcggcacctggatctactcagtgaataaggagcaactggcgagagcaggattttacgccctgggggagggcgacaaagtgaaatgtttccactgcgggggcggattgactgactggaaaccgtccgaggacccctgggaacagcacgccaaatggtaccccggatgtaagtacctgctggaacaaaaaggacaggaatacatcaacaatatccacctgactcatagcctggaggaatgtcttgtgaggaccactgagaaaactccctcactgactcggagaatcgatgacaccattttccaaaatccgatggtgcaggaagcgatccgcatgggcttttcctttaaggatatcaagaaaatcatggaagagaaaatccaaatctccggatctaactacaagtccctggaagtgctcgtcgcagatctggttaatgcacagaaggatagcatgcaagacgaatcgtcgcaaacctccctccaaaaggagatctcaaccgaggaacagctgagaaggctgcaagaagagaagctctgcaagatctgcatggaccgcaatatcgctatcgtgttcgtgccctgcggacatctggtcacctgtaagcagtgtgccgaagctgtggacaagtgcccaatgtgctacaccgtgatcactttcaagcagaagatcttcatgtcg

SEQ ID NO: 33821 - DNA, 1491 bp, synthetic construct
  misc_feature 1..1491: note = Description of Artificial Sequence: Synthetic coding sequence
  source 1..1491: mol_type = other DNA
atgacctttaactccttcgaaggcagcaagacttgcgtgcctgcagatatcaataaggaagaggaatttgtggaagaattcaacagactcaagaccttcgccaacttcccttcgggttccccagtttcggcatcgactcttgccagggcggggttcctgtatactggagagggcgacaccgtcaggtgtttctcgtgtcatgcagctgtggataggtggcagtacggagacagcgcagtcggacgtcataggaaagtgtcccctaattgtagatttatcaacggattctacttggaaaacagcgcaactcagtccaccaattctggaatccagaacggccagtacaaagtggaaaactacctgggatcgagggatcacttcgcgctcgatagaccttcggaaacgcacgcagactacctgcttcgcacgggacaagtggtggatatctccgatactatctatccgcgaaatcctgccatgtacagcgaggaggcccgactcaagtcctttcaaaactggcccgactacgcacatcttacccctcgcgaactcgcgagcgctggtctgtactatactggaatcggagatcaggttcaatgcttttgctgtggggggaaactgaagaactgggaaccctgcgaccgggcatggtcggaacatagacggcactttcctaattgtttctttgtgctggggaggaacctcaacataagatcggaatcagacgcggtgtcaagcgacagaaacttccccaacagcacgaacttgcctcgcaatccaagcatggcagactacgaggcccgcatctttactttcggaacttggatttactctgtcaataaagaacagctcgcacgcgcagggttctatgctctgggagaaggggacaaggtgaaatgctttcattgtggaggtggcctgactgattggaagccaagcgaggatccgtgggaacaacacgcaaagtggtacccagggtgtaagtatctgctggagcaaaaaggtcaagagtacattaacaacatccatcttacccattcattggaggaatgccttgtccgcaccaccgaaaaaaccccgtcgctgaccagacgaatcgatgataccattttccaaaacccaatggtgcaagaagctattcgtatgggattctcatttaaggacatcaagaagattatggaagaaaagattcaaatcagcggctctaattacaagtccttggaagtgctggttgcagacctggtgaacgctcagaaggatagcatgcaagatgaatcgtcccagacgtcccttcaaaaggagatttccaccgaagaacagctgcggcgactccaagaggaaaagctgtgcaagatttgcatggacagaaacatagcgatcgtattcgtcccctgtgggcatctggtgacctgtaaacaatgtgccgaggccgtggataaatgtcccatgtgttacactgtgatcaccttcaagcaaaagatctttatgtca

SEQ ID NO: 33822 - DNA, 1491 bp, synthetic construct
  misc_feature 1..1491: note = Description of Artificial Sequence: Synthetic coding sequence
  source 1..1491: mol_type = other DNA
atgacttttaactcgtttgaagggagcaaaacttgcgtgcccgctgacattaacaaagaggaagaatttgtggaagaattcaatcggcttaagacgtttgccaactttccaagcggatccccagtgagcgcatcgaccctggctcgggcgggattcctctacactggggaaggtgatactgtgcgctgtttctcgtgtcatgcagcagttgatcgatggcagtacggagactcagccgtcggacgacatcgcaaggtttcgcctaattgtcgatttatcaacggtttctacctggagaattcagcaactcaaagcaccaactcaggcatacagaatggccagtacaaggtggaaaactacctgggttcaagagatcatttcgcgctcgaccgaccgtccgaaacccatgcagattaccttcttcgcaccggccaagtcgtggacatttccgataccatctaccctcgaaacccagcaatgtactctgaggaagctcgactgaaatcctttcagaactggcctgactacgcacacctgaccccccgggaactcgcaagcgcaggactctactacacgggcattggagatcaggtgcaatgcttctgttgcggtggtaagttgaagaattgggaaccttgtgaccgtgcatggtcagaacatcgtcggcacttccctaactgttttttcgtccttggtagaaacttgaatattcggtccgagtcggacgccgtctcttcggaccgtaactttccgaacagcactaatcttccccgtaatccaagcatggctgattacgaggcacgcattttcaccttcggcacctggatttactccgtcaataaggagcagctggcacgtgccggtttttacgcacttggggaaggcgataaagtgaaatgcttccattgcgggggaggactgacggattggaaacccagcgaggatccttgggagcaacacgccaagtggtatcctgggtgtaagtatctgcttgaacaaaagggccaggagtatatcaacaatatccacctcacccactcgcttgaagagtgtcttgtgagaaccactgagaaaactccttccctgactcgaagaatagatgacaccatttttcagaatcccatggtgcaagaagcgatccgtatgggcttttcgtttaaggatatcaagaagattatggaagaaaagatccaaatcagcggaagcaattacaagagcctcgaagtgcttgtcgcagacctcgtcaacgcccaaaaagatagtatgcaagatgaatcgtcacaaacgtcactgcagaaggaaatttccaccgaggaacagcttagacgcctccaagaggaaaagctgtgtaagatttgtatggatcgtaacatcgcgatcgtctttgtgccatgtggccatctcgtcacctgtaaacaatgcgctgaggcagtagataagtgcccgatgtgttacactgtgataacttttaagcaaaagatctttatgtcg

SEQ ID NO: 33823 - DNA, 1491 bp, synthetic construct
  misc_feature 1..1491: note = Description of Artificial Sequence: Synthetic coding sequence
  source 1..1491: mol_type = other DNA
atgaccttcaactcgttcgaaggctcaaaaacttgcgtcccggccgacatcaataaggaagaggaattcgtggaagagttcaatcggctgaaaacctttgcaaacttcccaagcggatccccggtatcagcctcaacccttgcacgggcgggcttcctctacactggtgaaggcgataccgtgcgctgcttcagctgccatgcggccgtcgatagatggcagtacggggactcagctgtggggcgccaccgaaaggtgtcaccgaattgtagattcatcaacggattctacctggagaatagcgccactcagtcgactaactcggggatccagaacggccagtacaaggtggaaaactatctgggctctagggatcacttcgcccttgatcggccgtccgaaacccatgcggactacctccttcgcaccggacaagtggtggacatctcagatacgatctacccccggaatccggcaatgtacagcgaagaagctagactgaagtcattccagaattggccggactacgcccacctgacgccacgcgaactcgcgtcggctggactgtattacaccggaatcggtgaccaagtgcagtgcttttgctgcggcggaaagctgaagaactgggaaccttgcgaccgcgcgtggtcggaacatcggaggcactttccaaactgcttttttgtgcttggacggaacctcaatatcagaagcgaaagcgatgccgtgtcctccgacagaaacttcccaaactccactaatctcccgcgaaatccatcgatggctgactacgaggctcgcatcttcactttcgggacctggatctattccgtcaacaaggaacagctggctagagcgggattctacgcgctgggcgaaggcgataaagtgaaatgctttcactgcggaggaggtctgactgactggaagccgtccgaagatccgtgggagcagcacgcaaagtggtatccgggctgtaagtacctgcttgaacaaaagggacaggagtacattaacaatatacatctcactcactctctggaggaatgcctcgtccggaccactgaaaagactccgagccttactcggagaatcgatgacactatcttccaaaaccctatggtgcaagaagcaattagaatgggattctcatttaaggatatcaagaaaatcatggaagagaaaattcaaatcagcgggtcgaactacaagagcctcgaagtgctggtggccgacttggtgaatgctcagaaggactcaatgcaggacgagtcatcccaaactagcctccagaaggagatctcgactgaagagcagctcagacggctgcaggaagagaagctgtgcaaaatctgcatggatcgcaacatcgccatcgtctttgtgccttgcggccacctcgtgacttgcaaacagtgcgccgaagcagtggataaatgccccatgtgttataccgtgatcacctttaaacagaaaatcttcatgtcg

SEQ ID NO: 33824 - DNA, 1491 bp, synthetic construct
  misc_feature 1..1491: note = Description of Artificial Sequence: Synthetic coding sequence
  source 1..1491: mol_type = other DNA
atgacgttcaatagctttgaagggagcaagacctgtgtgccagctgatatcaacaaggaggaagagtttgtggaagagtttaatcgccttaagacttttgcgaattttcctagcggatccccggtgagcgcatcgactcttgcgagagcaggatttctgtacaccggcgaaggtgacactgtgcgctgcttctcgtgtcatgccgcagttgatcgttggcaatacggcgactcagcagtgggacgccataggaaggtgtccccaaattgtcgcttcattaacggtttctacctggagaactcagccactcaatccactaactcaggaatccagaacggtcagtacaaagtggagaactacctcggatcgagagatcactttgcgcttgatcgcccatccgaaacccatgccgattacctcctccggactggacaagtggtcgatatctccgatacgatatacccacggaatcccgccatgtactccgaggaagcccgactgaagtccttccaaaattggcccgactacgcacatcttactcctagagaacttgctagcgcagggctttactacaccggtatcggcgatcaggtccaatgtttttgttgtggaggtaagctgaagaactgggaaccttgtgatcgcgcatggtccgagcatcggagacattttcctaattgtttctttgtcctggggcgtaatctgaacattcgctcggaatcggatgcagtgtcaagcgatcggaactttcctaactcgacgaacctcccaagaaacccctcgatggcagactacgaagcacgaattttcacttttggaacttggatttactcggtcaacaaggaacaactcgcacgtgcaggtttttacgccctgggtgaaggtgacaaggtgaagtgtttccattgtgggggtggtttgaccgattggaagccttcggaagatccttgggaacaacatgcgaagtggtaccctggttgtaagtacctgttggaacagaagggtcaagaatacattaacaacatccatcttactcattcccttgaggaatgtttggtgagaactaccgaaaagactccctcgcttaccagacggatcgacgataccatttttcaaaaccctatggtccaggaagccattagaatgggtttctcctttaaggatatcaaaaagatcatggaggagaagatacaaatctcaggatccaattacaagtcccttgaagtgcttgtggccgatctcgtgaatgcacaaaaggactccatgcaggatgaaagctcccagacctcacttcaaaaagaaatctcaaccgaagaacagcttaggagactgcaggaagagaaactgtgcaagatttgtatggatagaaacatcgcaattgtgtttgtgccatgtggacacctcgtgacctgtaaacagtgtgcagaagcggtcgataagtgtcctatgtgctacacggtgataacctttaagcagaagatctttatgtca

SEQ ID NO: 33825 - DNA, 1491 bp, synthetic construct
  misc_feature 1..1491: note = Description of Artificial Sequence: Synthetic coding sequence
  source 1..1491: mol_type = other DNA
atgacattcaactctttcgaaggctcaaaaacctgtgtccctgctgacatcaataaggaagaagaattcgtcgaagagtttaatcggctgaagacgtttgccaattttccttcaggttctccggtctctgctagcacattagccagggctggtttcttgtacacaggggagggggacacagtacggtgcttttcctgccacgcagccgtcgacaggtggcagtatggcgattctgccgttggcagacataggaaggtctcacccaactgcagatttatcaacggtttttaccttgagaacagtgccacgcagtccactaatagtggaattcagaatgggcagtataaggtcgaaaactacctgggctcgagggaccactttgcgctggaccgaccatccgaaactcatgcagactatctgcttagaactggccaggttgtcgatattagtgacacaatatatcctaggaaccctgccatgtattctgaagaggccaggctgaaatctttccagaattggccagactatgcccacttaacgcctagagagctggctagcgcgggactttattataccggaatcggggaccaggtccagtgcttctgctgcggggggaaacttaaaaactgggaaccttgtgatcgagcttggtcggagcataggaggcacttcccaaactgcttttttgtgctcggtagaaacctcaatattcgctccgaaagcgacgctgtatcaagcgataggaatttccccaactctaccaaccttccgcgcaacccctctatggcagattatgaagcgaggattttcacatttgggacttggatttattcagtcaacaaggagcagctggccagggccggcttctacgctctgggagaaggtgataaggtgaaatgcttccattgtgggggagggttgaccgactggaagcctagtgaagacccttgggagcaacacgccaaatggtaccccgggtgcaaatatttgttggagcagaagggacaggaatatattaacaatatccacttgacccacagcctcgaagagtgtctagtcagaactactgagaaaactccctccctcactaggaggatagacgataccatttttcagaacccaatggtgcaagaagccatccgcatgggctttagctttaaggatatcaagaagattatggaagaaaaaatccagatctctggaagcaactacaaatcccttgaagtgctagttgctgatctcgtgaacgcgcagaaagactccatgcaggacgagtcaagtcaaacctccttgcagaaagagatctcaacagaggaacaactgcgaaggctgcaggaagagaaactttgtaagatctgtatggacaggaacattgctattgttttcgtgccttgtggtcatctcgttacgtgtaaacaatgtgccgaagcagtggacaagtgccccatgtgttatacggtcattacctttaaacaaaagatatttatgtcc

SEQ ID NO: 33826 - DNA, 1491 bp, synthetic construct
  misc_feature 1..1491: note = Description of Artificial Sequence: Synthetic coding sequence
  source 1..1491: mol_type = other DNA
atgacgtttaattcttttgaggggagcaagacctgtgtaccagctgacatcaataaagaggaagaatttgtggaggagtttaatagattgaaaaccttcgctaattttccatctggctcacccgtgtctgcgagcacactggcgcgggcaggcttcctgtatacgggtgagggtgatactgtgagatgtttcagctgtcacgctgccgtggatcggtggcaatacggcgacagtgctgttgggcggcatcgcaaggtgtcccctaactgtcggttcatcaatggtttctacttagagaatagtgcgacacaaagcactaacagcgggattcagaatgggcaatataaagtagaaaactacctcgggagccgcgatcatttcgctttggaccggccaagtgagactcacgcagactatctccttaggactggacaggtggtggatattagcgataccatttaccctagaaaccccgccatgtattccgaggaagccaggttgaagtcctttcaaaattggcctgactacgctcatttaaccccacgggaattagcctcagctggcctctattacactggaattggggaccaagtccagtgtttctgttgtggtggaaaattgaagaattgggaaccttgtgatcgcgcgtggtccgaacatcggaggcattttcccaactgtttcttcgtcttaggacggaacctgaatatcaggagcgagagcgatgccgtgtcctcagaccggaatttccccaatagtacaaacctgccacggaaccctagcatggccgactatgaggcacgcatattcacttttggtacttggatctacagtgttaacaaagagcagcttgcgcgcgcagggttctacgccttgggtgagggtgacaaagtcaagtgcttccactgcggaggaggcctgacagactggaagccctccgaagacccatgggaacagcatgctaagtggtatccaggctgtaaatatctccttgagcagaagggacaggagtacattaacaacatccatttgacgcactcgttggaggagtgtctagttcggacaacagagaaaacgccatcgctgacaagaagaattgacgacaccatatttcagaatccgatggtgcaggaggcaatccgaatgggtttctcatttaaagatataaagaaaattatggaggaaaagatccagatctccgggagcaactataaaagtctggaagtgctagtggccgacctcgtgaatgctcaaaaggactcgatgcaagatgagtcctctcagaccagtctgcagaaggagatttcaactgaagaacagctcaggagactgcaagaggagaagctatgtaagatctgcatggatcgcaacatcgcgatagtcttcgttccgtgcggccacctggtgacctgtaagcagtgcgccgaggccgtcgataagtgccctatgtgctacacggtaatcacatttaagcagaaaattttcatgtca

SEQ ID NO: 33827 - DNA, 1491 bp, synthetic construct
  misc_feature 1..1491: note = Description of Artificial Sequence: Synthetic coding sequence
  source 1..1491: mol_type = other DNA
atgacctttaactcttttgagggttccaagacctgtgtccccgcagacataaacaaagaagaggagttcgtggaagagttcaaccggctgaagacattcgctaactttccatcagggagcccagtctctgcctctaccctggcaagggcaggattcttgtataccggcgaaggcgacacagttcgatgcttttcatgtcatgcagcagtggaccggtggcagtatggcgattcggcggtcgggcggcacaggaaggtctcacccaactgcaggttcattaatggtttctatttggaaaactcagctactcagagtaccaattccggcattcagaatggccagtataaagtggaaaattacctcggatcccgggatcatttcgcactagaccgtccgtccgagacacacgcagactatcttctgcgtaccggccaggtcgttgacatatctgatacaatatatccccgaaacccggctatgtactcagaggaagcgcggctcaaaagctttcaaaactggccagattacgctcatctcactccccgtgaactcgcctccgctggcctgtactacacggggattggggaccaggtccagtgtttttgttgcggtggcaagctgaagaactgggagccctgcgaccgcgcgtggagtgaacaccggagacattttccaaactgtttctttgtacttgggcgtaacctgaatattagaagtgagagcgacgcagttagtagcgaccggaattttcccaacagtaccaatctgcctaggaatccctctatggctgattacgaggctagaatttttaccttcgggacgtggatatactcggtgaataaagagcagttggcccgggccggcttttatgccctgggcgaaggcgacaaagtgaagtgttttcactgtgggggagggctgaccgactggaaaccatcagaagacccttgggagcagcatgctaagtggtatcctggctgcaaatatctgctcgagcaaaaaggtcaggaatacattaataacattcacctgacccattccctagaagagtgcctggttcgcactaccgagaaaacgcccagccttacacggcggattgatgataccatcttccaaaaccccatggtccaggaggctattcggatggggttttcattcaaggacattaagaagattatggaggaaaaaattcaaatatccggaagcaattacaaaagtctggaagtcctggtcgcagatctggtcaacgcccagaaggattccatgcaggatgagagctctcagacctctttacagaaagaaatttccaccgaagagcagcttagacgcctgcaggaggaaaagctttgcaagatttgcatggacagaaatatcgctatcgtgtttgtcccatgtggtcacctggtcacctgcaaacaatgcgctgaagccgtcgataagtgccctatgtgttacacagtcatcaccttcaagcagaagatattcatgtca

SEQ ID NO: 33828 - DNA, 1491 bp, synthetic construct
  misc_feature 1..1491: note = Description of Artificial Sequence: Synthetic coding sequence
  source 1..1491: mol_type = other DNA
atgacttttaattcattcgaggggagcaaaacctgtgtgcccgcagatattaataaagaagaagagtttgtagaggagtttaacagattaaaaacttttgccaacttcccctcgggttctcccgtgagcgcaagcacactcgccagagcaggatttttatacaccggagagggtgatactgtcaggtgtttctcttgccacgcagccgttgaccgatggcagtacggagacagcgctgtcggacgccaccgcaaggtttcaccgaactgcagatttatcaatggattctatctcgagaattctgctactcagtccacaaactccggtatccagaatggccagtacaaggtggaaaattatctcgggtcccgggaccattttgccctcgatcggccttccgagacccacgcagattacctgttgcgaaccggccaggttgttgatattagtgacaccatttaccctcgaaaccccgctatgtacagcgaggaagctagactgaagagctttcagaattggcccgactacgcccatctgaccccgagagagttggcatccgctggcctgtattacaccgggataggagatcaggtacagtgcttttgctgcggagggaagctcaaaaactgggagccctgtgaccgagcctggtccgagcataggaggcacttcccaaattgtttcttcgtactggggaggaacctaaacatcaggtctgagtccgacgcagttagttcggaccggaactttcccaactcaacgaatctgccgagaaacccttctatggccgactatgaggctaggatttttacgttcggcacctggatttatagcgtgaacaaggagcagctagcaagagctgggttttacgccttgggggaaggggacaaagtgaagtgttttcactgcggtgggggtctcacagactggaaaccgtcagaggatccttgggaacagcatgccaagtggtaccctggctgcaaatacctgttggagcagaagggccaggagtacatcaacaatatacacctcacacacagtctggaagaatgcctggttcgtaccacggaaaagaccccttcactcacgcggaggatagatgataccatctttcagaacccaatggtgcaggaggccattcggatgggattctccttcaaagacattaagaaaatcatggaggagaagatccagatttcaggttctaactataagagcctcgaagtgcttgttgcagacctagtgaacgcacaaaaagatagcatgcaggacgaatcctcacaaacaagcctgcagaaggaaatctccaccgaggaacagctgcggcgcctacaagaggaaaaactctgcaaaatttgcatggatcgtaacattgccattgtgtttgtgccgtgcggacacctggttacttgtaaacaatgtgccgaagccgtcgacaagtgccctatgtgctacaccgtaatcaccttcaagcagaagatattcatgtcg

SEQ ID NO: 33829 - DNA, 1491 bp, synthetic construct
  misc_feature 1..1491: note = Description of Artificial Sequence: Synthetic coding sequence
  source 1..1491: mol_type = other DNA
atgaccttcaattcttttgaaggatctaaaacctgcgttcctgctgacattaataaggaagaggaattcgtggaggaatttaacaggctgaagaccttcgcaaactttccttccgggtcccccgtgtccgcctctaccctggctcgcgccgggttcctctataccggggaaggcgacaccgtcaggtgtttctcttgccatgccgccgtggacagatggcagtacggggatagtgctgtcgggcggcaccgaaaggtgtcgccaaactgcaggtttattaacgggttctatctggagaacagcgccacgcagtcaacaaactctggtattcagaacggacagtacaaggtggaaaattacctggggtcacgcgatcatttcgcactcgatcgaccgtccgagacccacgctgactacctgttgagaacgggacaggtggttgatatctcagatactatctatcccaggaaccctgccatgtacagtgaggaggctcggctgaagagtttccagaattggcccgattacgcccacctgacaccacgcgaacttgcaagcgctggactctattacacgggaataggcgaccaggtccagtgcttttgctgcggtgggaagctcaagaactgggagccatgcgatcgagcctggtcagaacaccggaggcacttccctaactgcttcttcgtgctaggacgtaaccttaatattcggagcgaaagcgacgcggtgtcctccgacagaaacttccctaattcaactaacctgccacggaaccctagtatggcagactatgaagctcgaatctttacattcggcacgtggatctacagtgtcaacaaagagcagctggcacgggctggtttctacgccttgggcgagggtgacaaggtgaagtgtttccattgcggaggcggacttacagactggaaacctagtgaggacccctgggagcagcatgctaagtggtatcctggatgtaaatacttgctggagcaaaagggtcaggagtatataaacaatatccacctgacacacagcctggaagagtgcctggttaggaccactgaaaagactcccagcctgactcgccggatcgacgataccatttttcagaaccccatggtacaggaggccatccggatgggtttcagcttcaaggacatcaagaagataatggaagaaaaaattcagattagcggaagtaattacaagtctttagaggtccttgtagcagacctcgttaacgcccagaaggactccatgcaggacgaatcttcacagacctcattgcagaaggagatctccaccgaggaacagctgcggaggctccaagaagaaaaactgtgcaagatctgcatggaccggaacattgccatagtattcgtcccctgcggccacctagtgacctgcaagcagtgtgccgaagccgtcgacaagtgtccaatgtgctatactgttatcactttcaaacagaagatctttatgagt

SEQ ID NO: 33830 - DNA, 1491 bp, synthetic construct
  misc_feature 1..1491: note = Description of Artificial Sequence: Synthetic coding sequence
  source 1..1491: mol_type = other DNA
atgacttttaactcttttgaaggaagtaaaacatgcgtgccggccgacattaacaaggaggaggaatttgtggaagaattcaaccgtctgaagaccttcgcgaactttccctcgggttccccagtatcagccagtactttggcccgagcgggttttctgtacactggagaaggagatactgtcagatgcttctcctgccatgctgcggtagacaggtggcaatacggagatagtgcagttgggaggcacagaaaggtgtcccccaattgtcgcttcataaacggattctatctcgaaaatagcgctacccagtccactaactctggtatccagaatggtcaatataaagttgaaaactacctaggtagccgtgatcactttgccttggacagaccttcagaaactcatgccgattaccttcttcgaaccgggcaagttgttgatattagcgatactatctatcctcgtaatcctgccatgtatagcgaagaggccaggctgaagtcttttcaaaattggcctgattacgcccacttgacaccaagggagttggcatcagcaggtttatactatacaggcattggtgatcaagtccaatgcttttgctgcggaggtaaattgaaaaattgggaaccttgcgatagagcctggtctgaacacaggcggcactttcccaactgctttttcgtcttgggcaggaacttgaacataaggtctgaatccgatgccgtaagctctgaccgtaatttcccaaatagtactaatttgccccggaacccatcgatggcagattatgaagcacgcatctttacctttggtacttggatctattcagtgaataaggagcaattagctagagccggcttctacgctcttggtgagggagataaggttaagtgtttccattgcgggggtggacttactgattggaagccaagtgaggatccttgggaacaacatgccaagtggtaccctggatgcaagtaccttctcgagcaaaaaggacaagagtatatcaataatatacatctcactcactcattggaggaatgtctcgtcaggactactgaaaaaacgccttccttgacaaggaggattgatgacactattttccagaacccaatggttcaagaagctattagaatgggatttagctttaaggatataaagaagatcatggaggaaaagatccaaatatctggtagcaactataaatccctcgaggttcttgttgcggatcttgttaatgcccaaaaggatagcatgcaagatgaaagcagtcaaacgagcttgcaaaaggaaattagtactgaggaacagctcagacgtttgcaagaggagaagctctgtaaaatttgcatggacaggaacattgctatagtgttcgttccatgtggtcatttggttacttgtaaacaatgtgctgaagccgtggataagtgtcccatgtgttatacagttatcacgtttaaacagaagatttttatgtcc

SEQ ID NO: 33831 - DNA, 1491 bp, synthetic construct
  misc_feature 1..1491: note = Description of Artificial Sequence: Synthetic coding sequence
  source 1..1491: mol_type = other DNA
atgacatttaattcgtttgaaggcagtaagacctgcgtccctgccgatattaacaaggaggaggagttcgtagaggaattcaaccggctgaagaccttcgccaacttcccaagcgggtcccctgtttcagcatctacactggctcgtgcaggattcctttacacaggcgagggcgataccgtgagatgcttctcctgtcatgccgccgtcgaccggtggcaatacggggactccgctgtgggacggcacaggaaagtatccccaaactgcagatttataaacggcttctacctagagaatagcgcaacccagtctactaacagcggtatacagaacggtcagtataaggtggaaaattatctgggctccagagatcacttcgctctggaccgtccatcagagacccacgctgattatcttctgaggactggccaggtcgtagatatctctgacacgatctatcctcgaaaccctgctatgtattctgaggaagcacgcttgaagagcttccaaaattggcccgattatgcacacttaactccccgagagctggcatctgccggtctctattatacaggcataggagatcaggttcagtgtttctgctgcggaggtaaacttaaaaattgggaaccttgcgaccgagcatggagcgaacacagaaggcattttcccaattgctttttcgtcttgggacgtaacctgaacatccggagcgaatctgatgccgtgtcaagtgacaggaattttccgaattccaccaatctcccccgtaatccatccatggcagattacgaggcaagaatttttacgtttgggacatggatttacagcgtaaacaaggaacagctggctcgggcgggcttctatgctctgggggaaggcgacaaagttaaatgtttccactgcggaggggggctgacagattggaagccctctgaggacccttgggaacagcacgccaagtggtaccccggatgtaaatatctgctggaacagaaagggcaggaatacataaacaatattcaccttacacacagcctggaggagtgcttggttcgcaccactgaaaagaccccctcactcacacgtcgcattgacgataccattttccaaaatcctatggtccaggaagcaatcagaatggggtttagtttcaaagacattaagaaaattatggaggagaaaatccagatctcgggctccaattataaatccctggaagtattggtcgccgaccttgtgaacgcgcagaaggatagtatgcaggacgagtccagtcaaaccagcctccaaaaagagatctctacagaggaacagctgcgtcgcctacaagaagaaaagctgtgtaaaatctgtatggatcggaacattgctatcgtttttgtaccttgtgggcacttagtgacttgtaaacaatgcgccgaggcagttgataagtgtcctatgtgctataccgtaatcacctttaaacaaaagatatttatgagc

SEQ ID NO: 33832 - DNA, 1491 bp, synthetic construct
  misc_feature 1..1491: note = Description of Artificial Sequence: Synthetic coding sequence
  source 1..1491: mol_type = other DNA
atgactttcaactcgtttgaaggatccaaaacctgtgtcccagcagatatcaacaaggaagaagaatttgtggaagagtttaatcgcctcaagactttcgccaacttcccgtccggatcgcccgtgagcgcaagcactctcgcaagggctggcttcctgtacaccggagaaggcgataccgttagatgtttttcctgtcacgcagcagtggatagatggcaatacggtgactctgcggtgggcagacaccggaaagtctcgcctaattgcaggttcataaatgggttttatctcgaaaattctgcaacccaaagcaccaacagcggcatccaaaatggccaatacaaagtcgagaattaccttggctcgagagatcacttcgcgttggacaggccctcggaaacccatgccgattacctcctccgtactggtcaggtcgtggatatctcggacacgatttaccctcgcaaccccgcgatgtactccgaggaggcaagactgaagagctttcagaattggccggactacgcccatcttacccctagggaactcgcatcggcaggcctttactataccggaattggggaccaagtgcaatgcttctgttgtgggggaaaacttaagaactgggagccctgtgacagagcatggtcggagcatcgtagacatttcccaaactgtttcttcgtgctcggacggaacctcaacatccgctccgaatccgacgcagtgtcatcagatagaaactttccaaattccactaatctccctagaaaccctagcatggccgactacgaagcccggattttcacttttggaacctggatctactccgtgaataaagagcagcttgcgcgcgcaggcttttacgcactgggtgaaggagacaaggttaaatgctttcattgtggaggaggcctgactgactggaaaccttcggaggacccatgggagcagcacgccaagtggtatcccggctgtaagtacctgctggagcaaaaaggacaagaatacatcaacaatattcatctgacccattcgcttgaagaatgcctcgtgagaactaccgaaaagaccccatcgcttacgcgacggatcgatgacactattttccagaacccgatggtccaggaagcaattcgcatgggtttctcgtttaaggacattaagaaaatcatggaggaaaagatacagatcagcggttcaaactacaagtctctggaggtcctcgtggcagacctggtgaacgctcagaaagatagcatgcaggatgagagctcacaaacttcactgcaaaaggagatttcgaccgaagagcaacttcggagactgcaggaagagaagctgtgcaaaatctgcatggatcgaaacatcgccatagtctttgtgccttgcggtcatctggtgacctgtaagcaatgtgcagaagcagtggataagtgtcctatgtgctacacggtcattacgtttaagcagaaaatcttcatgtcg

SEQ ID NO: 33833 - DNA, 1491 bp, synthetic construct
  misc_feature 1..1491: note = Description of Artificial Sequence: Synthetic coding sequence
  source 1..1491: mol_type = other DNA
atgactttcaacagcttcgagggatcgaaaacgtgtgtccctgccgatatcaataaggaagaagagtttgtcgaagaattcaatcgcctcaagacctttgctaatttcccatcgggaagcccggtgagcgcctccaccctcgcgcgcgctgggttcctctacaccggtgaaggagacacggtgcgatgcttcagctgccatgcggccgtggataggtggcagtacggagattccgcagtcgggcggcatcggaaggtgagcccgaactgcaggttcatcaatggtttttacctggagaactcagctacccagagtactaactcgggaatccagaatggacagtacaaggtggagaactaccttggaagtcgggaccacttcgccctcgatcgcccctcggaaacccacgccgattaccttctgcggacgggacaagtggttgatatctcagacacgatctacccacgcaacccggcgatgtactcagaagaagcacggctgaagtctttccaaaattggccagactacgcgcacctgaccccccgcgaactcgcgtctgccggactgtactataccggtatcggagatcaggtgcagtgcttctgctgcggaggtaagctgaagaactgggaaccatgcgaccgcgcctggtccgagcacaggcggcatttccccaattgcttcttcgtcctgggtagaaacctcaatattcggagcgagtcagatgcggtgtccagcgacaggaacttcccaaactcaactaacctcccgcggaatccttccatggccgactacgaagccagaatcttcaccttcggcacgtggatctattcagtgaacaaagagcaactcgctagggcaggcttttatgccctgggagaaggagacaaggtgaaatgcttccactgcggcgggggcctcaccgactggaaaccttcggaagatccgtgggaacaacacgcaaagtggtaccctggatgcaaatacctgctggagcaaaagggacaggaatacatcaataacatacacctcactcattctcttgaagagtgtctcgttcgcaccacggaaaaaaccccatccttgactcgcaggattgacgacactattttccaaaatccgatggtgcaggaagccatccgaatgggattctccttcaaggacatcaaaaagatcatggaagagaaaatccaaatctcaggatcgaactacaagtcgctcgaggtgctggtggccgatctggtcaatgcgcaaaaggactcaatgcaggacgaatcgtcgcaaacctccctccagaaagagatcagtactgaagagcaattgcggagactccaggaagagaagctctgcaagatttgcatggatcgcaacatcgccatcgtgtttgtgccttgtggccatctcgtgacttgcaagcagtgtgccgaggcggtggacaagtgccctatgtgctacactgtgatcacctttaaacagaagattttcatgtct

SEQ ID NO: 33834 - DNA, 1491 bp, synthetic construct
  misc_feature 1..1491: note = Description of Artificial Sequence: Synthetic coding sequence
  source 1..1491: mol_type = other DNA
atgactttcaattctttcgaagggtctaaaacttgcgtaccagcagacatcaacaaggaggaagagttcgttgaggagtttaaccggctcaaaactttcgcaaacttcccgagcggatctccagtgtcggcatcaacgcttgcgcgggccggattcttgtatactggcgagggagatactgttagatgtttttcctgtcacgccgcggttgatcggtggcagtacggcgacagtgcagtcggcaggcacaggaaagtctcgcctaattgccgattcattaatggattctacctggagaactcagcaacacagtctactaattcagggatccagaatggacagtataaggttgagaattacctgggtagtagagatcattttgcgctggatcggcccagcgagactcatgccgattacctgttgcgtactggccaagtcgtggacatcagtgacaccatctatccaaggaatccggctatgtactcggaagaagcccgccttaaatcgttccaaaattggcccgactacgctcatctgacaccaagggaacttgcttccgctggcttgtactatacgggtattggagatcaagtgcagtgcttctgctgcggcggcaagcttaaaaactgggaaccatgtgatcgagcctggtccgaacacagacgccacttccctaactgtttttttgtattaggcagaaatcttaacattaggtcagagagcgacgccgtctcatccgataggaactttcccaacagcaccaacctgccacgcaacccaagtatggccgattatgaggctcgaatcttcacgttcgggacttggatatacagcgtgaataaagagcaactcgctcgggccgggttttacgcccttggagagggggataaggtcaagtgctttcactgtggaggaggcctcactgattggaaaccctcggaggatccatgggagcaacacgcaaagtggtatccaggatgtaagtacttgctcgagcagaaaggtcaggagtacattaacaacatacacctgacccattcccttgaagagtgcctggtcagaactactgaaaaaacaccgtctctgacccgacgaattgatgataccatttttcagaacccgatggtccaggaagctatccgaatggggttctcattcaaagacatcaagaagattatggaagagaaaatccagatctccgggagcaactataaaagcctggaagtgctggtcgctgacctcgtcaacgcacaaaaagattcaatgcaggacgaatcctcgcagacaagtttgcagaaagaaatctcgaccgaagagcagctgagacgactgcaggaggaaaagttatgcaagatttgtatggaccggaacatcgctattgtgttcgtgccttgtggccacttggtgacttgcaagcagtgtgccgaggcagttgataaatgtccaatgtgctacaccgtcattacgttcaagcagaaaattttcatgtcc

SEQ ID NO: 33835 - DNA, 1491 bp, synthetic construct
  misc_feature 1..1491: note = Description of Artificial Sequence: Synthetic coding sequence
  source 1..1491: mol_type = other DNA
atgaccttcaatagcttcgagggttcaaagacttgcgttccagccgatatcaacaaggaagaagagttcgtggaagagttcaaccggctcaagacgttcgccaatttcccttccggatccccggtgtcagcttcaaccctggctcgggccgggttcctttatacgggcgaaggcgataccgtgaggtgcttctcctgccatgcggcagtcgatcggtggcagtacggagattcagcagtggggaggcatcgcaaggtgtcgccgaattgcaggtttatcaacggattctacttggaaaacagcgcaactcaatcgaccaactcggggattcagaacggccagtacaaggtggaaaactacttgggctcccgggaccatttcgccctggacaggccttccgaaacgcacgccgattatcttctgcgcaccggccaagtggtggacatttcagacactatctatccgagaaatcctgctatgtactcagaggaggctagactcaaatcatttcagaactggcctgactacgcgcatctcaccccgagagagctggcgtcagccgggctctactacactgggattggagatcaagtgcagtgtttctgctgtgggggaaagctgaagaattgggagccttgcgacagggcatggtcagagcaccgcagacattttccaaactgtttcttcgtgctcggccgaaatctgaacatcaggagcgaatcggacgctgtgtcgagcgatagaaatttcccaaactcgactaatctgccacggaacccatcaatggcggattacgaagcccggattttcaccttcggaacctggatttactcggtgaacaaagaacagctggcccgggccggcttctacgctctgggagagggagacaaggtcaagtgctttcactgcgggggaggtctgaccgattggaagccgtccgaagatccgtgggaacaacacgccaaatggtacccaggctgcaagtacctcctggaacagaagggccaagagtacatcaacaacatccacctgacccactccctggaagagtgccttgtcagaaccaccgagaaaaccccctccctgacccgccgcattgatgacaccatcttccagaacccgatggtgcaggaggccatccgcatgggattctccttcaaagacatcaagaagatcatggaagagaagattcagatatccggttccaactacaaatccctggaggtcctggtggcagacctcgtcaacgcgcaaaaggatagcatgcaggacgagtcgtcccagacctctctccagaaagagatttccaccgaagagcagctgcggcgcctgcaagaggaaaagctgtgcaagatctgcatggaccgcaatatcgcaatcgtctttgtgccttgcgggcatttggtgacttgcaagcagtgcgccgaagcggtggacaaatgcccgatgtgttataccgtgatcacctttaagcaaaagatattcatgagc

SEQ ID NO: 33836 - DNA, 1491 bp, synthetic construct
  misc_feature 1..1491: note = Description of Artificial Sequence: Synthetic coding sequence
  source 1..1491: mol_type = other DNA
atgactttcaatagtttcgaaggatcaaagacctgcgtcccagccgatatcaataaggaagaggaattcgttgaggagttcaaccgcctcaagactttcgcaaacttcccttccggatcccctgtctcggcttcgaccctggctagagccggcttcctgtataccggagagggcgacactgtgagatgcttctcgtgccatgccgcagtggaccggtggcagtatggtgattcagctgtcggtagacacagaaaagtgtcaccgaactgccgcttcatcaacggcttctacctcgagaattcggctactcagtcgactaattccgggatccaaaacggacagtacaaagtggagaattacttggggtccagggaccacttcgcgctggaccggccaagcgagactcacgcagactacctgctgcgcaccggacaggtggtggatatcagcgacaccatctaccctcgaaacccggcgatgtacagcgaagaggcccgcctgaagtccttccagaactggccggactacgcgcaccttactccgcgcgagctggcttccgcgggactgtactacactgggatcggggatcaagtgcagtgcttctgctgtggcggaaagctgaaaaactgggaaccatgcgaccgggcctggtcggagcatcgccgccacttccccaattgttttttcgtgctcggacgcaatttgaacatcagaagcgaatcggacgcagtgtccagcgataggaacttccctaacagcaccaacctccctcgcaaccccagcatggcagactacgaagcccgcatctttactttcggaacctggatctactcggtcaataaggagcagctcgcgagggccggattctacgctctgggagaaggcgacaaggtcaagtgctttcattgcggtggcgggctcacggattggaaaccgtcagaggacccgtgggagcagcacgccaagtggtacccgggctgcaaatacctcctggaacagaagggccaggaatacattaacaatatccacctgactcactcactcgaagaatgtctcgtgcggacgaccgagaaaacccccagcttgactcgccgcattgacgacactatctttcagaacccaatggtccaagaggcgatccgcatgggattctcctttaaagacatcaagaagattatggaagaaaagatccagatctcgggatcgaactacaagagcttggaggtgctcgtggcagatcttgtcaatgcacagaaggactctatgcaagatgagtcatcgcagacgtcgctccagaaggaaatttccactgaagaacaactccggagacttcaagaggaaaaactgtgcaagatctgtatggacagaaatatcgcgatcgttttcgtgccgtgtggacatttggtgacttgtaagcaatgcgccgaggccgtcgataagtgtccgatgtgctacacggtcatcacttttaagcaaaagatctttatgtcc

SEQ ID NO: 33837 - DNA, 1491 bp, synthetic construct
  misc_feature 1..1491: note = Description of Artificial Sequence: Synthetic coding sequence
  source 1..1491: mol_type = other DNA
atgaccttcaactcatttgaaggatccaagacctgcgtgccggcggatattaataaagaggaggagtttgtcgaagaatttaaccgcctgaaaacgttcgcaaatttcccgtcagggtcgccagtgtcagccagcaccctcgccagggccgggtttctgtacacgggcgagggagatactgtgcgctgcttttcctgtcatgccgccgtggaccgctggcagtacggcgactcggccgtcgggcgccaccgcaaggtgtcgccgaactgcagatttatcaatggtttctacctcgagaacagcgctacccagtcaaccaactctggaatccagaacggccagtacaaggtggaaaattacctcggttcgcgcgaccacttcgctctggaccgccctagtgaaactcatgctgactaccttctgcgcactggccaggtggtcgatatctccgacactatctacccacgcaacccggctatgtacagcgaagaggcaaggctgaaatctttccagaactggccggactacgctcatctcaccccacgggaactcgcgtccgccgggctgtactacaccggaatcggcgaccaggtgcaatgcttctgttgtggtggcaagttgaagaattgggaaccgtgcgacagagcgtggtcggaacaccggcggcatttcccgaattgcttcttcgtgctgggaagaaacttgaatatccggagcgagtcagacgccgtctcgtcggaccgcaacttcccgaactcaactaacctgccccggaacccctcgatggccgattacgaggcacgtatcttcactttcggaacgtggatctactcggtgaataaggagcagctggcgcgagcgggattctacgccctgggtgaaggagacaaagtcaagtgtttccattgcggaggagggcttaccgactggaagcctagcgaggatccctgggagcaacacgcaaagtggtacccaggctgcaagtatctcctggaacagaagggacaggaatatatcaataacatccacctgactcactccttggaggagtgcttggttcggaccaccgaaaagaccccatccctcactcggagaattgatgataccatttttcagaaccctatggtgcaagaagcgatccggatgggattctcattcaaagacatcaagaagatcatggaagaaaaaattcaaatctccggatccaactacaagtccctggaagtgctggtggcagatctcgtcaatgcccaaaaggactcgatgcaggatgaaagctcgcagacttcccttcaaaaagaaatcagcaccgaagagcaactgaggagactgcaagaggagaaactttgtaaaatatgcatggatagaaacatcgccatcgtgttcgttccttgcggacacctcgtcacttgcaagcagtgcgcggaggcagtcgacaagtgtccgatgtgctacactgtgatcacctttaagcagaagattttcatgagc

SEQ ID NO: 33838 - DNA, 1491 bp, synthetic construct
  misc_feature 1..1491: note = Description of Artificial Sequence: Synthetic coding sequence
  source 1..1491: mol_type = other DNA
atgactttcaactcgtttgaggggtctaagacctgtgtgccggccgacatcaacaaggaggaggaattcgtggaggaattcaataggctcaaaacttttgccaacttcccatcgggatcaccagtctccgcctcaaccctggcccgggccggtttcttgtacaccggcgagggagataccgtccggtgcttcagctgccacgctgccgtggatcgctggcagtacggagattcggctgtgggacgccatcgaaaggtgtcaccgaattgccgcttcataaatggattttaccttgagaactccgcgacccaatcaactaattcaggcatccagaacggacaatacaaagtggagaattatctgggatcaagggaccacttcgcgctcgaccgcccctccgagactcatgcagattacttgctgagaaccggccaggtcgtggacatctcagacaccatttacccacggaacccggcaatgtacagcgaggaggccaggctcaagtcattccaaaattggcctgattatgcccacctcacccctcgcgaactggccagcgctggactctactacaccggaattggggaccaggtgcaatgcttctgctgtggagggaaactgaaaaactgggaaccttgcgatcgcgcatggtcggaacaccggcggcatttccctaactgcttcttcgttttgggacgcaacctgaacatacggagcgagtccgatgcagtctcctccgaccggaatttcccgaacagcactaaccttccaagaaaccccagcatggccgactacgaagctcgcattttcaccttcggaacttggatctacagcgtcaataaggagcagctggcccgagcaggattctacgcgctgggggagggagacaaagtcaaatgttttcattgcggaggggggctgaccgattggaagccgtcggaagatccttgggaacaacacgcgaaatggtacccgggttgcaagtacctgctggaacaaaaaggacaggagtacatcaacaatatccaccttacccatagcctggaggaatgcctcgtgaggaccactgaaaaaactccaagccttactcggcgtattgatgatactatctttcagaacccgatggtccaagaagcgatccggatggggttcagctttaaagacatcaaaaagatcatggaagagaagattcagatttcgggatcaaactacaagtccctggaggtgctcgtggctgatttggtgaacgcccagaaggacagcatgcaggacgaatcatcgcagacctccctgcagaaggagatcagcaccgaagaacagctgcggcggctgcaagaggagaagctgtgcaaaatctgtatggaccggaacatcgcgatcgtgtttgtgccgtgcggacacctcgttacttgcaagcagtgtgcggaagccgtggataagtgtccaatgtgctacaccgtgatcacctttaagcagaagatctttatgagc

SEQ ID NO: 33839 - DNA, 1491 bp, synthetic construct
  misc_feature 1..1491: note = Description of Artificial Sequence: Synthetic coding sequence
  source 1..1491: mol_type = other DNA
atgactttcaactccttcgagggttcaaagacttgcgtgccggcggatatcaacaaggaggaggagttcgttgaggagtttaaccgtctcaagaccttcgcgaactttcctagtggttcacctgtctccgcctctaccctagctcgtgctgggttcctgtatacgggagagggtgacaccgtgagatgcttcagctgccacgcggcggtagaccgttggcaatacggagactcagctgtcggccgtcacaggaaggtttcccctaattgccgtttcattaacggtttctatttggaaaacagtgcgacccagtccacaaattcaggcatccagaacggtcagtataaggtagagaattatctggggtcccgcgatcatttcgctctggaccggcctagcgagacccacgccgactacttgctccgcaccggtcaagttgttgacatcagcgatacgatctacccacgtaaccccgctatgtattcggaggaggcacgtttgaagtccttccagaactggcccgattacgctcaccttactccccgcgagctggcttcggcgggattatattacaccggcatcggtgatcaggtacagtgcttctgctgcgggggcaagctgaaaaattgggaaccctgcgatcgagcgtggtcagaacaccggagacacttccccaactgtttcttcgtcctgggcagaaatttgaacatccgcagtgagtccgacgccgtctcctccgaccgtaacttcccgaactctaccaacctccctcgaaatccgtccatggctgactacgaggccaggattttcaccttcggaacctggatctactccgtcaacaaggagcagctggccagggctggtttttatgccctgggagaaggggacaaggtgaagtgctttcactgcggcggcggactgaccgactggaagcctagcgaggatccttgggagcaacacgcgaaatggtacccgggttgcaagtatctcttggagcaaaagggacaggagtatatcaataatatccacctgacccacagcctggaggagtgcctggtccgcactaccgagaagaccccgtctttgactcgccggatcgatgacaccattttccagaaccctatggtccaggaggccatccggatgggcttcagtttcaaggacattaagaagatcatggaggagaagattcagatctccggctcgaactacaagtcccttgaggtgctggtagccgacctcgtgaacgcacagaaagactcgatgcaggacgagtcctcccaaacgtctttgcagaaggagatcagcaccgaggagcagctccgccgtctgcaggaggagaagctctgcaagatctgcatggacagaaatattgccatcgttttcgtcccctgtgggcatctggtgacctgtaaacagtgcgcggaggccgtggataagtgtcccatgtgctacacggtcatcaccttcaagcagaagatcttcatgagc

SEQ ID NO: 33840 - DNA, 1491 bp, synthetic construct
  misc_feature 1..1491: note = Description of Artificial Sequence: Synthetic coding sequence
  source 1..1491: mol_type = other DNA
atgacctttaacagttttgaaggtagcaagacttgcgtgcccgcagacattaacaaagaggaagaatttgtggaggaattcaatcgcctcaagactttcgcaaacttcccctcgggtagcccagtgtccgcgtcaaccctggctcgggccgggttcctttacaccggtgagggcgacactgtgagatgctttagctgccatgctgctgtcgataggtggcagtacggagatagcgcagtggggagacacagaaaagtctcacccaattgtcggttcattaacgggttttatctggaaaactccgcaacccagtcaaccaactcgggcatccagaatggccagtacaaggtcgagaactacctgggctcccgcgatcatttcgcactcgatcgtccatcggaaacccatgcagattacctgcttagaactggacaagtggtggatatttcggataccatatacccaaggaatccggcgatgtattccgaagaggcgaggttgaaaagtttccaaaactggccagactacgcccatctgacccctcgcgaactggcctcagccgggctttactacaccggaatcggagatcaggtgcagtgcttttgctgtggaggtaaactgaaaaactgggagccttgtgatagggcatggtccgaacatagacgccatttcccaaattgttttttcgtccttggacgtaaccttaacattcgctccgaatccgatgccgtgtcatcagacaggaattttcccaactccaccaacctgccaagaaacccctcgatggcagattacgaagcccggatcttcactttcggaacctggatttactcggtgaacaaggaacaactggcacgagccggcttctacgcattgggagaaggtgacaaagtgaagtgttttcattgtgggggaggtctgactgactggaagccctcagaggacccatgggaacagcatgctaagtggtacccggggtgcaaatacctgctcgaacaaaagggacaagaatacattaacaacatccaccttacccactctctcgaagagtgtctggtccgcactacggaaaaaacgcctagcctcactcgtagaatcgatgacaccatttttcaaaatccgatggtccaggaagcgattcgcatgggtttttcgtttaaagacattaagaaaatcatggaggaaaagattcaaatttccggatcgaactacaagtcgctggaggtcctggtcgcagacctggtgaatgcacaaaaggattccatgcaagatgaaagctcgcaaacctcgctgcaaaaggaaatttcgaccgaggagcaactgcgccggctccaggaagaaaagttgtgtaagatctgcatggatcgcaacatcgcaattgtgttcgtgccatgtggtcacctggtgacctgtaagcagtgtgcagaagccgtcgacaaatgtcctatgtgttacaccgtgataacttttaagcagaagatattcatgtca

SEQ ID NO: 33841 - DNA, 1491 bp, synthetic construct
  misc_feature 1..1491: note = Description of Artificial Sequence: Synthetic coding sequence
  source 1..1491: mol_type = other DNA
atgacatttaactctttcgagggctctaagacctgtgttccagctgatatcaacaaggaagaggaatttgtggaggagtttaaccgactgaaaactttcgctaatttccccagtggctcccctgtctcagcgtcaacactcgctcgagcagggttcctctatactggcgagggggacacagtgcgatgtttcagctgccacgctgctgtggatcgctggcagtacggtgactctgccgttggccgtcatcggaaggtgtcgcctaactgccggttcatcaacggattttacctagagaattctgctactcagagcactaattccggtatccagaatggacagtacaaagtggaaaattacctgggctccagggatcactttgccctggaccgtccatccgagacccacgcagattatctgcttaggacaggtcaagtcgttgatatttcagatacaatctatccccgcaaccctgcgatgtactctgaggaagcgcgcctcaaaagtttccaaaattggcctgattacgcacatcttacccctagggaacttgcgtccgcaggcctgtattatacaggcatcggtgaccaggtccagtgtttctgttgtggcgggaagctaaaaaattgggagccctgtgacagggcctggagcgaacatcgcagacatttcccgaattgtttcttcgtactcggcagaaatcttaacatcagatccgagtctgatgccgtgtcaagtgacagaaatttcccgaatagtaccaatttgccccgcaatccatctatggccgattacgaagctaggatttttacttttggcacctggatatattcagtgaataaggaacagctcgctagggcagggttttacgcacttggggagggcgacaaagtcaaatgttttcactgcggaggaggactcaccgactggaagccatccgaggatccatgggaacagcatgctaaatggtatcccggctgtaaatatttactagaacaaaaaggacaagaatatattaacaatattcacctaacacactctctcgaagaatgcctggtccgcactactgagaaaacccccagcctcacacgtcgcattgacgatactatcttccagaatcctatggtccaagaagccattcgcatgggattttcctttaaggatatcaaaaagatcatggaggaaaaaatccaaatcagtgggagcaactataagtccctggaagttttggttgccgacctagtcaatgcacagaaagattccatgcaagatgagtcttcccagacctcactccagaaggagattagcactgaggaacagttgcgtcggcttcaagaagaaaagctttgtaaaatatgcatggaccgtaacatagctattgtgttcgtcccttgcggacacctggttacttgtaagcaatgcgcggaggctgtcgacaagtgtcctatgtgttacacggtgattactttcaagcaaaagatcttcatgtct

SEQ ID NO: 33842 - DNA, 1491 bp, synthetic construct
  misc_feature 1..1491: note = Description of Artificial Sequence: Synthetic coding sequence
  source 1..1491: mol_type = other DNA
atgacctttaacagcttcgagggcagcaagacgtgtgtgccagcggacataaacaaagaggaagagtttgtggaagaattcaatagacttaagacctttgcaaatttcccatccggatcgccggtgtcagcatccacccttgccagggcaggattcctctacacgggggaaggagataccgtgagatgtttttcctgccacgccgcagtggacagatggcagtacggtgattccgccgtcggaaggcatagaaaggtgtcccccaactgtcgcttcataaatggattctatcttgaaaattccgccacgcaatcaactaactcgggaatacaaaacgggcagtacaaggtggaaaactacctcggatcacgcgatcacttcgcgcttgatagaccatccgaaacgcatgccgactacttgcttcgaaccggccaagtggtggacatttcagacacgatttacccccgcaaccctgcaatgtactccgaagaagcgagactcaaatcctttcagaattggccagattacgcacatctcactccccgagaactcgcgtcggcaggtctgtattacactggaatcggtgatcaggtgcaatgcttctgttgtggggggaagctcaagaattgggagccatgcgatcgtgcatggtcagagcatcggagacacttccccaactgcttttttgtcctgggtagaaacctgaacattagatcagagtcggacgcagtctcctcagacaggaattttccgaactctaccaacctccctcggaatccttcgatggcagattacgaagcgcggatctttacctttggcacgtggatttactcagttaacaaggaacaactcgcccgcgcaggcttctatgcccttggagaaggtgataaagtgaaatgcttccattgtggcggcggcctgaccgattggaagccttcggaggacccttgggagcaacacgctaagtggtaccctggatgtaagtacctcctcgagcagaagggtcaggaatacatcaataacatccatctgacccatagccttgaagagtgtcttgtgagaaccactgaaaagactccttcacttactagaaggattgatgataccatctttcaaaacccgatggtccaagaggcgatcagaatgggattctccttcaaggacattaagaaaatcatggaagagaaaatccaaatatccggctcgaattacaagtcgcttgaagtgttggtcgcagatctggtcaacgctcagaaagatagcatgcaggacgaatcaagccaaacttctctgcaaaaagagatctcaaccgaggaacaactgcgcaggctgcaagaagaaaagttgtgcaagatttgtatggatcggaacattgcaattgtgtttgtgccttgtggacatctggtcacttgcaagcaatgtgcggaagcagtggacaagtgtcctatgtgttacaccgtgattaccttcaaacagaagattttcatgtcc

SEQ ID NO: 33843 - DNA, 1491 bp, synthetic construct
  misc_feature 1..1491: note = Description of Artificial Sequence: Synthetic coding sequence
  source 1..1491: mol_type = other DNA
atgacattcaactcctttgagggctccaagacatgtgtcccagctgatattaacaaagaggaagaattcgtcgaagaattcaaccgcttgaagactttcgcaaattttccgtctggatctcctgtgagtgcaagtacactggcacgagcaggcttcctctatactggagagggcgacacagtgcgttgtttctcttgtcacgccgctgtggatagatggcagtatggcgattcggcagtgggccgccacaggaaggtttctcccaactgcaggttcataaatggtttttacttagaaaattcagccacccaatcaactaacagcggaatccagaatggtcagtataaggtggaaaattacctcgggtctagagatcacttcgcactggacagaccctctgaaacccacgctgactacctgctgcgcacaggccaggttgtcgacatcagtgataccatttatccacgaaatcccgccatgtacagcgaggaggctaggttgaagtccttccagaactggcctgattacgcccacttaactcccagagagctggcgagcgctggcctctactacacagggatcggagaccaggtgcaatgtttctgttgtggcggaaagttgaaaaattgggagccatgtgaccgggcctggagtgagcaccggagacatttcccgaactgtttctttgtactgggtcgaaacctgaacattcgctctgaaagcgacgcggtttcatcagatagaaacttccctaattccactaatttgcctagaaacccttcaatggccgactacgaagcaagaatctttacctttggcacatggatctattcagtgaataaagagcagctggcccgcgccggcttttatgctctgggcgaaggggacaaggtaaagtgttttcattgtggtgggggcctgactgattggaagccatcagaagacccctgggaacaacatgcgaaatggtaccctggctgcaaatacttattggaacaaaagggccaagagtatattaacaacatccacctgacccacagtctggaagaatgtctggtgcgcacgacagagaaaactccatctctcacacgacggatagatgatacgatcttccaaaatcctatggtccaggaggccatcaggatgggtttttcctttaaggatataaaaaaaataatggaagagaagatccagatctcaggtagtaattataaatcacttgaggtgcttgttgctgacttagtgaacgcacagaaggactcaatgcaggatgagagctcccagacaagtcttcagaaggagatatctactgaggagcagcttcgccgtctacaggaagaaaaactgtgcaagatctgtatggaccgcaatatagctatcgtgttcgtgccgtgtggccacctggtcacctgtaagcagtgtgccgaggcggtcgataagtgccccatgtgttacactgtcattacttttaagcagaagatcttcatgtcc

SEQ ID NO: 33844 - DNA, 1491 bp, synthetic construct
  misc_feature 1..1491: note = Description of Artificial Sequence: Synthetic coding sequence
  source 1..1491: mol_type = other DNA
atgacgttcaattctttcgaaggaagtaaaacctgcgtgcccgcagacattaacaaagaggaagaatttgtagaggaatttaatcggttaaagacatttgcaaattttccttccgggtcccctgtatccgcaagtactttggcgcgagccggcttcctgtacaccggggagggggacactgtgcggtgcttctcttgccacgctgcagtggacaggtggcagtatggcgatagcgcggttggccgacaccgaaaagtgagccctaattgccgcttcattaatgggttttatttggaaaatagcgccacccagtcaaccaatagcggtatccaaaacggccagtacaaggtggagaactacctgggatctagggaccattttgccctggaccgacccagcgagacacatgctgattatttactgaggactggccaggttgtggatattagtgatacaatctaccctcggaaccccgcgatgtacagcgaggaggcacggctgaagagttttcagaactggccggactacgcccatctaacaccccgcgaactggcgagcgccgggttatactacacaggtataggcgatcaagtccagtgcttctgctgtgggggaaaactgaagaattgggaaccttgtgaccgagcatggtctgagcacaggagacatttccctaattgcttttttgtgctgggacggaatctcaatatcagatctgagagtgatgccgtgtccagcgaccgtaacttcccaaactctacgaacttacctcgtaatccgtcgatggctgactatgaggctcgaatttttactttcggtacctggatatacagtgtgaacaaggagcaattagctcgggctggattttacgcactgggagaaggcgacaaagtgaagtgcttccattgtggcgggggcttgaccgattggaagccgagtgaggacccatgggaacagcatgcaaaatggtacccaggctgtaagtacctgctcgagcaaaagggccaggagtacattaataatatccacctgacacattcactggaagagtgtttagtgcgtacgaccgaaaagacaccgtctctgactcgacgaattgacgataccatattccagaaccccatggtacaggaggcaattcgtatgggcttctcctttaaggatattaaaaagattatggaagagaaaatacagatatccggatccaactacaagtcgctggaggtcttggtcgcagatttagtgaacgcccaaaaggatagtatgcaggatgagagttcacagacttcactgcagaaagagatatccaccgaggagcagctgagaaggctgcaggaggagaaactgtgcaaaatctgtatggatcgcaacatcgctatcgtgtttgtgccctgcggacacctggttacctgcaaacagtgcgcagaggcagtagacaagtgccccatgtgttacactgttatcacctttaaacagaagattttcatgagc

SEQ ID NO: 33845 - DNA, 1491 bp, synthetic construct
  misc_feature 1..1491: note = Description of Artificial Sequence: Synthetic coding sequence
  source 1..1491: mol_type = other DNA
atgacattcaacagttttgagggttcaaagacttgtgttcccgccgacatcaacaaggaggaggaatttgtggaagaatttaatcgcctaaaaacatttgcaaattttccatctgggtcgccagtgtctgcttccacccttgccagagcaggttttctgtacacgggggagggtgacactgtacggtgcttttcgtgccacgcggccgtggatcggtggcagtatggtgatagcgccgttgggcggcaccgaaaggtgtcgcctaattgcagatttataaacggcttctatcttgagaacagtgcaactcagtccactaattccgggatccagaatggccagtataaggtggagaactacctcggtagtcgggatcatttcgcactggaccgtccgagtgagacccatgccgactacttgctgcgaaccggccaagttgtggacatctctgacactatctacccacgcaatccggccatgtatagtgaggaagccagacttaaaagctttcagaattggccggactacgctcatctgactcccagggaactcgcctccgctggattgtattacacgggcatcggtgaccaggttcaatgcttctgctgtggcgggaaattaaagaattgggaaccttgcgacagagcgtggtctgagcatcgacgtcacttcccgaactgtttttttgtgctgggaaggaatttgaacatacgctccgaatcagacgctgtgtcgtcagatagaaatttcccaaacagtaccaatctgccgaggaacccgtctatggctgactacgaagcccggatctttacattcgggacctggatctacagcgtgaataaagagcagctggcgcgggccggcttttacgcacttggagagggtgataaggtaaagtgctttcattgtgggggagggctgaccgactggaaacctagtgaagatccatgggagcagcacgccaagtggtacccaggatgcaagtatctgctcgaacaaaaggggcaggagtacattaacaacatacacctgacacacagcttagaggagtgtctggtgcggaccactgagaaaacaccaagcttaacacggcgcattgatgacactatctttcaaaaccccatggtgcaggaggctatccgaatgggcttttcattcaaggacataaagaagataatggaggagaagatacagattagtggctctaactataagagccttgaggtcctggtggcagatctcgtgaatgcccagaaggacagtatgcaagacgaaagctcccagacgagcctccagaaggagatatccacagaggagcagctgcggcgccttcaggaggaaaagctctgcaaaatatgtatggatcgaaatattgctatcgtgtttgtgccttgtggacacctagtgacctgcaagcagtgcgctgaagccgtcgataaatgccctatgtgctacaccgtgataacttttaagcagaagatcttcatgagt

SEQ ID NO: 33846 - DNA, 1491 bp, synthetic construct
  misc_feature 1..1491: note = Description of Artificial Sequence: Synthetic coding sequence
  source 1..1491: mol_type = other DNA
atgaccttcaacagctttgaagggtctaagacatgcgtgcctgccgatatcaataaggaggaggaatttgtggaggagttcaacaggctgaagaccttcgcgaacttccccagcggatctccggtctctgcatccaccttggcccgagccggttttctgtatacaggagaaggcgacactgtccggtgcttcagctgccatgcggccgtggacaggtggcagtacggcgacagcgctgtaggccggcacagaaaggtttctcccaactgtcgattcattaatggattttatctggagaactctgcaacgcagagcacaaactctggcatccaaaacggccagtataaagtggaaaattatctcggcagtagggatcacttcgccctcgatagaccgtccgagacacacgccgactacctgctgaggactggtcaggttgtcgatatctcagataccatttatcctcgcaatcccgccatgtactccgaagaggcccgcctcaaaagctttcagaattggcccgattatgcccatcttactcctcgggagctcgcatcagcagggctgtattacaccggaatcggcgaccaggttcagtgtttttgctgtggcgggaaattgaagaattgggagccttgtgacagagcttggtccgaacatagacgccattttccaaattgtttcttcgtgctgggccggaatctgaacattcggtcagagtcagacgcagtgagctccgaccgcaacttccctaacagtaccaatctgcccaggaacccctccatggccgattacgaggcacgaatatttacctttgggacctggatctactccgtgaataaagagcaactcgctagagccggattctacgcccttggggagggcgacaaggttaagtgcttccactgcggcggagggttgacagattggaaaccctcagaagacccgtgggaacaacacgcgaagtggtacccgggatgtaaatatctcctggagcagaaaggacaagaatacataaacaatatccatctgacccatagcctggaggagtgtttggttagaaccactgaaaaaactccttccctgactcggcgcatagatgataccatcttccagaatcctatggtgcaggaggccatacggatgggcttctcttttaaagatatcaagaagatcatggaagaaaagattcagattagcgggtccaactacaaatctctggaagtgctcgtggccgacctggtcaatgcccaaaaggactcaatgcaagacgagtcttcacagacttccctccaaaaggaaattagcaccgaggagcagctgagaagacttcaggaggagaaactttgcaagatctgcatggaccgcaacattgcgatcgtgttcgtcccttgcggacacctggtgacctgcaagcagtgtgccgaggcagtagataagtgcccaatgtgttacaccgtgatcacgttcaagcagaaaatctttatgagt

SEQ ID NO: 33847 - DNA, 1491 bp, synthetic construct
  misc_feature 1..1491: note = Description of Artificial Sequence: Synthetic coding sequence
  source 1..1491: mol_type = other DNA
atgaccttcaactcctttgaagggagtaagacttgcgtcccggcagatattaacaaagaagaagaatttgtagaggaatttaaccggctgaaaactttcgccaatttcccatctggaagtcccgtctctgcctcaaccttggcccgagccggctttctctatacaggagaaggtgatacggtgcgttgctttagctgccatgccgctgtcgatcggtggcaatatggcgatagcgcggtcggacgtcacaggaaagtttcaccgaattgtcggtttattaatggtttttatctcgagaattcagcgacacagtcaacaaattcgggaatccagaacgggcaatacaaagtcgaaaattatcttggaagccgcgatcactttgctcttgatagaccaagcgaaacccacgctgattaccttttacgtacgggtcaagtggtagatatctcagacacaatttatcctcgcaatcctgcaatgtattctgaggaagcaagattaaaatcctttcaaaattggcctgattatgcccaccttacaccgcgagagctggcgtctgcggggctctattacacgggaattggggatcaggttcagtgtttttgttgtggcgggaaattgaaaaactgggagccatgcgatagagcatggagtgaacaccgtagacatttccctaactgtttttttgtattaggacgtaacttgaacatccgcagtgaaagcgacgctgtctcatcagaccgtaactttcctaattcaactaatctcccgcggaatcccagcatggctgattacgaggcacgcattttcactttcgggacatggatatattctgtaaataaagaacagttagctagggccggattttatgctttgggagaaggagacaaagtgaagtgttttcactgcggcggggggctgacagattggaaaccatcagaagacccttgggaacaacacgctaaatggtatcccggctgtaagtacctgttagagcagaaaggacaagagtatattaataatattcatttaactcactctctggaagagtgcctggtacggacaaccgaaaaaactccttccctcacgaggaggattgatgatacgatcttccagaacccgatggtgcaggaagcgatccgtatgggattctcgttcaaagatatcaaaaaaattatggaggagaaaattcaaattagtgggtccaattacaagtctctagaggtattggtggccgatctagttaatgcccaaaaagatagtatgcaagatgaaagcagccaaactagcttacagaaagaaatttccacagaagaacagcttagaagactacaagaagaaaagttgtgcaaaatatgcatggatcggaatatcgctattgtatttgtcccgtgtgggcatctggttacatgcaaacaatgcgcagaggccgtcgataagtgccctatgtgctatacggtgattacttttaaacaaaaaatctttatgtcc

SEQ ID NO: 33848 - DNA, 1491 bp, synthetic construct
  misc_feature 1..1491: note = Description of Artificial Sequence: Synthetic coding sequence
  source 1..1491: mol_type = other DNA
atgacctttaattcctttgagggttctaagacatgcgtgcccgcagacattaacaaggaagaggaattcgtagaggaattcaataggctgaaaacgtttgcaaatttcccctcagggtcgcccgtgtctgcatccaccctcgcacgcgccggcttcttgtacactggcgagggggatactgtaagatgtttctcatgtcacgctgccgtcgaccgctggcagtacggtgactccgctgtaggtcggcaccggaaggtaagccctaattgtcggttcatcaatggcttttacctggagaatagcgctacacagtcaaccaattcaggtattcaaaatgggcaatataaggttgaaaattacctggggtccagagaccactttgccttagatagaccaagcgaaacacacgctgattacctactgcgtaccggccaggttgtggatatctctgatacaatatacccaaggaatccggctatgtattccgaggaagcaaggctgaagtcattccaaaactggcctgattacgcccacctcacacctcgcgaacttgcttccgcaggactatactatacaggcatcggagatcaggtccagtgcttctgttgtggcggaaaactaaaaaattgggagccatgtgatcgagcctggtcagaacatcggcgtcactttcctaattgctttttcgtgttgggcaggaatctcaatataagatcagaaagcgatgctgtttcttccgatagaaatttcccaaactctacgaacctgccgaggaatccttctatggcagactacgaggcccggatttttacatttggaacttggatttacagtgtaaataaagagcagttggcccgggcgggattttatgccctgggtgaaggagacaaggtaaaatgtttccattgcggaggtggtctgactgactggaaacctagcgaggatccgtgggagcagcatgcgaagtggtatccggggtgcaagtacctgctcgagcagaaaggccaggaatatattaacaacatccatctaactcactcattagaagaatgtctggtgaggaccacagaaaagacaccatcattgacacgtcggatagatgacacaatcttccagaatccaatggttcaggaggctatcaggatgggcttttcctttaaagatatcaagaaaatcatggaagagaagatacaaatttcgggaagcaactataaatctcttgaggtcctagtggcagatctagtcaacgctcagaaggattccatgcaggacgagtcttctcagacatctctccagaaggagataagcactgaggagcagttgcggaggttgcaggaggagaagctgtgcaagatctgcatggatagaaacattgccatcgttttcgtgccatgcggtcatctagttacttgtaaacagtgcgctgaggccgtcgacaaatgccccatgtgctacaccgttattacctttaaacaaaagatcttcatgagc

SEQ ID NO: 33849 - DNA, 1491 bp, synthetic construct
  misc_feature 1..1491: note = Description of Artificial Sequence: Synthetic coding sequence
  source 1..1491: mol_type = other DNA
atgaccttcaacagctttgaggggtctaaaacatgtgtccctgcagacatcaataaggaggaggaatttgtggaagaatttaacaggcttaagacattcgctaattttcctagcggttctccagtatccgcctccactctggcgagggccggcttcctgtacacgggagagggtgacaccgtgaggtgtttttcatgccatgcggcagttgaccgatggcagtacggagattctgctgttggtcgccataggaaggtgtcccctaactgccgcttcataaatgggttttatttggagaattccgcgacacagtccaccaacagcggtattcagaacggccagtataaagtggagaactatctggggtcccgcgatcactttgccctcgaccgaccgtccgagactcatgctgattacctcctacggaccgggcaggtagtggacatcagcgatacaatttatcctcggaatccagccatgtacagcgaggaagcacgactgaagagtttccagaattggcctgattacgcccacctaacccccagagaattggcctccgctggtctttactatacaggtatcggtgaccaggtgcagtgcttttgttgtggtggaaaactcaagaattgggagccatgcgaccgggcatggagtgagcatcgaaggcattttccaaactgtttcttcgtgctgggccgcaaccttaacatacggtccgagtcagacgccgtaagctctgaccgaaatttccccaactctaccaacttaccccggaaccctagtatggctgactacgaggcacgcatttttacgtttgggacatggatctattccgtgaacaaagagcagctagcaagggccggattctacgctttgggggagggggacaaggtgaagtgcttccactgtggtggggggttaacagattggaagccatcggaagatccctgggagcagcatgctaagtggtaccccggctgcaaatacttactggaacagaaagggcaggaatacatcaataatatccatctgacgcatagcctggaggaatgcctggtcagaactacagagaagaccccctccctaacccggcgcatcgacgataccattttccagaatcccatggtccaagaggccataaggatgggttttagcttcaaggacatcaaaaaaatcatggaagaaaagatacagataagcggaagcaactacaaaagtctcgaggtgctggtggccgacctagtcaacgcacagaaagattccatgcaggacgagtccagtcagacatcactccagaaggaaatctctaccgaagaacagctgaggaggcttcaggaagaaaaactctgtaagatctgcatggacaggaatatcgctatcgtcttcgttccgtgtgggcatcttgtgacttgcaaacaatgcgccgaggccgtcgataaatgcccaatgtgttacaccgtgatcaccttcaaacagaagatcttcatgtct

SEQ ID NO: 33850 - DNA, 1491 bp, synthetic construct
  misc_feature 1..1491: note = Description of Artificial Sequence: Synthetic coding sequence
  source 1..1491: mol_type = other DNA
atgacattcaactcgttcgagggaagcaagacttgcgtccctgccgacatcaataaagaagaggaattcgttgaagagttcaacaggctgaagacattcgcaaactttccatccgggtcccccgtgtccgcttcaacacttgctagggccggattcctgtatacaggagaaggagacactgttcgctgtttctcatgtcacgcagccgtcgatcggtggcagtacggggatagcgctgtcggcaggcaccgcaaagtgtccccaaattgtcggttcattaacgggttttatctcgagaactcagccactcaaagcacgaatagcggcatccaaaacgggcagtacaaggtggaaaattacctgggttcccgcgatcactttgccctggaccggcccagcgagacccatgccgactacctcctaaggacaggccaggtagttgacatttccgacactatctatccgcgcaatcctgccatgtactcagaggaagcacggctgaagtcttttcaaaattggcccgactacgcgcacctgacaccgcgtgaactcgcctccgccggactgtattacaccggaatcggcgaccaggtgcagtgtttttgctgcggaggtaaactgaaaaactgggagccttgcgatagggcatggtctgagcaccggaggcatttcccaaattgtttttttgttcttgggcgcaacttgaacatcaggtctgagtctgacgctgtcagctcggacaggaatttcccaaattccactaatcttccgcgcaatccctccatggctgattacgaagcccggatatttaccttcggcacctggatctactccgtgaataaggagcagctggctcgtgcagggttttatgctctaggtgaaggtgacaaagttaagtgctttcactgcggcggaggcttaactgactggaaaccgagtgaagatccttgggagcaacacgctaaatggtatcctggttgtaagtacctgcttgaacagaaaggtcaggaatacattaataacatccatttgacacactcactcgaagagtgtttagttagaactactgaaaaaactccctcactgacccggcggattgatgacaccatatttcagaatcctatggtgcaggaggccattcgcatggggtttagtttcaaggacataaagaagatcatggaagagaagatccagataagcggttctaactataagtccttggaggtgctggttgctgacctggtgaatgcccagaaagattcaatgcaagacgaaagctctcaaaccagcctgcagaaggaaatcagcaccgaggaacaactgcgaaggctgcaggaagagaagttatgcaaaatttgtatggatcgaaatatcgccatagtattcgttccgtgcgggcacctcgtgacttgcaaacaatgtgccgaggccgtagataaatgtcctatgtgctatactgtgattacgtttaaacagaagatcttcatgagc

SEQ ID NO: 33851 - DNA, 1491 bp, synthetic construct
  misc_feature 1..1491: note = Description of Artificial Sequence: Synthetic coding sequence
  source 1..1491: mol_type = other DNA
atgacattcaatagctttgagggaagcaaaacttgcgtgcctgctgatattaacaaggaggaagaatttgttgaagaattcaatagactgaaaaccttcgcaaacttcccatcgggttcacctgtgtcagcgtcaactctcgcgcgagccggcttcctgtacacaggcgaaggtgataccgttaggtgtttttcttgccacgccgctgttgatagatggcagtacggggacagtgccgttggccggcaccgtaaagtttctcctaactgtcggtttattaatgggttctacctagagaatagtgcaactcagtcaactaactcgggtattcagaacggtcaatacaaggttgagaattaccttggttccagagatcacttcgccctggaccggccgagtgagacacacgctgactacttgttaaggacaggccaggtggtggacatctccgacacaatctaccctcggaaccccgctatgtactcagaagaggcccgcctgaagtctttccagaattggccagactatgcccatttaacacctagagagctcgcctcagcgggcctgtactatactggcattggcgaccaggttcagtgtttctgttgcggtggtaaactaaagaactgggagccatgcgaccgggcctggagtgagcatcgcaggcacttccccaactgtttttttgtcctgggcaggaaccttaatatcaggtcagaaagtgatgctgtgtcaagtgacagaaactttcctaatagcacaaacctgccccgcaatcccagtatggcagactacgaagctcgcatatttactttcggcacctggatctattccgtaaataaggagcagctggctagagccggattctatgcgctgggggaaggcgataaggttaaatgcttccactgtggcggtggcctaacggattggaaaccatccgaagacccttgggagcagcacgccaagtggtacccaggatgcaaatacctcctggagcaaaagggccaggagtacataaacaacattcatctcacgcattccctggaggagtgtcttgtgaggaccaccgagaaaaccccctctctaaccaggcgaatcgacgacaccatttttcagaacccgatggtgcaggaggctatcaggatggggttctcctttaaagacatcaagaagatcatggaagaaaaaatccagatctccggctcaaactataagagcttggaagtcctagtggctgacctcgtaaacgcccagaaggactcaatgcaagacgagtcatcccagacttccctgcagaaggagatctcaacagaagagcaactgaggaggttacaggaggaaaaactctgcaaaatctgtatggacaggaacattgctatcgtgtttgtgccatgcggtcatctcgttacctgtaagcaatgcgctgaggcagtggacaaatgtcctatgtgttacactgttatcacatttaaacaaaagatttttatgagc

SEQ ID NO: 33852 - DNA, 1491 bp, synthetic construct
  misc_feature 1..1491: note = Description of Artificial Sequence: Synthetic coding sequence
  source 1..1491: mol_type = other DNA
atgacttttaatagttttgagggatccaagacatgtgtgcccgctgatataaacaaagaggaagaattcgtcgaggaatttaacaggctgaagacctttgctaacttcccatccggatctcctgtgagtgcatccactttggcaagggcggggttcctctacacaggagaaggtgatacagtgcgatgtttcagctgtcacgctgccgtggaccggtggcagtatggtgattctgcagtaggccgacaccgcaaagtgtcccccaactgccgctttatcaatggattctatttggaaaactccgctacccagtcgacgaacagcggtatacagaacggtcaatacaaggtggaaaattatctggggagtcgggaccattttgcattggatcgtccttcagaaactcatgccgattacctgctgagaacaggtcaggttgtcgacatctcagatactatatatcctcgcaatcctgccatgtattcagaagaggcacgactgaagagctttcagaactggcccgactatgctcacctgacaccaagagaattagcatcggccggtctttactacacaggaatcggtgaccaggttcagtgtttttgctgcgggggcaagttaaaaaactgggaaccatgcgacagagcctggagcgagcataggaggcatttccctaactgctttttcgtgctggggcgcaacctgaacatcagatctgaatccgacgccgttagttcagatcgtaatttcccaaacagcaccaatcttccgcgaaatccatccatggcggattacgaagcccggatcttcacctttggcacttggatctacagcgtgaataaagaacagctggcgagggcgggcttctacgccttgggagagggagacaaagtgaagtgtttccattgtgggggcggactgaccgactggaagcccagtgaggatccttgggagcagcacgctaagtggtacccaggttgcaaatacttgctggagcagaagggccaggaatatatcaacaacattcacctgacacactccctggaagagtgcctggtgcgaacaaccgaaaagactccctccctgaccagacgaatcgacgacacgattttccaaaacccaatggttcaggaggcaatccgaatgggtttttctttcaaagacatcaagaagatcatggaggagaaaatccaaatcagcggtagcaattataaatccttagaggtgctggtggccgacctggtcaacgctcagaaggactcaatgcaagatgagtccagccaaacttcactgcaaaaggagatttctactgaagagcaactgagacgcctgcaggaagaaaaactctgcaagatctgtatggatcgaaatatcgccattgtttttgttccttgtggccaccttgtgacttgtaagcagtgtgcagaagcggttgacaagtgcccaatgtgttatacggtgattacatttaaacagaagatcttcatgagc

SEQ ID NO: 33853 - DNA, 1491 bp, synthetic construct
  misc_feature 1..1491: note = Description of Artificial Sequence: Synthetic coding sequence
  source 1..1491: mol_type = other DNA
atgacctttaactcatttgagggctccaagacctgcgtgcccgcggacattaacaaggaagaggaattcgtcgaggaattcaacagactcaagactttcgccaatttcccaagcgggtcccccgtgtccgcgtcgactctggctcgcgcaggttttctttacacgggtgagggtgatactgtgaggtgtttttcgtgtcacgccgcggtggaccgctggcaatacggagattccgccgtgggtcggcacaggaaggtttcgcccaactgccgctttatcaacggtttttacctggagaactccgcaactcagagcactaactcgggtattcaaaacggacagtacaaagtggagaattatctggggagcagagatcactttgcacttgataggccatcggaaacccatgcagactaccttctcagaactggacaggtggtggacatatcggataccatttacccaaggaacccagccatgtactcggaggaagcaagacttaagtcatttcagaactggccggattacgcccacctcacgcctcgcgaactggcctcggcaggactgtactatactggaattggggaccaggtccagtgtttctgttgtggagggaagctgaaaaactgggaaccgtgcgatagagcctggtctgagcacaggcgtcatttcccaaattgctttttcgtccttggtcgcaatctcaatattcggtccgagtccgatgcagtgtcctctgataggaattttcctaactcaaccaatctccctcgcaacccttcgatggcagactacgaagcacggatattcacttttggaacttggatttactcagtgaataaggagcaactggccagagccggattctacgcactgggagaaggagataaggtgaagtgctttcattgtggagggggtctgactgattggaagccttccgaagatccttgggaacagcatgcaaaatggtacccaggctgtaaatacctcctggaacaaaaaggacaggaatacatcaataacatacatctgactcattcactcgaagagtgcctcgtccgaactaccgaaaagactccgtccctgactcgacggatcgatgataccatttttcagaatcccatggtgcaagaggcaattcgaatgggttttagctttaaggatatcaaaaagataatggaagagaagattcagatttcaggatccaactacaagagcctggaagttcttgtggcagatctcgtgaatgcacagaaagactcaatgcaggacgaaagcagccaaacctcactccaaaaggagatatcgaccgaagaacagctgagacgcctccaggaagagaaactctgtaaaatctgtatggatagaaacattgcaattgtgtttgtcccttgcggacacctggtcacttgcaagcaatgcgcagaagccgtcgataagtgcccaatgtgttacactgtgatcaccttcaagcaaaagattttcatgagc

SEQ ID NO: 33854 - DNA, 1491 bp, synthetic construct
  misc_feature 1..1491: note = Description of Artificial Sequence: Synthetic coding sequence
  source 1..1491: mol_type = other DNA
atgacattcaactcttttgaagggtccaagacctgtgtgcctgctgacattaacaaggaagaggagttcgttgaggagttcaatcggctgaagacctttgcaaattttcctagcggctcacctgtgtccgccagcactttagctcgggccggctttctgtacacaggagagggagacactgtgcggtgtttctcttgccacgctgccgtggaccgttggcagtacggcgattcagcagtggggcggcaccgcaaagtttcccccaactgccgctttatcaatgggttctatctcgagaactctgccacccaaagcaccaatagcggcatacaaaacggccagtacaaagttgagaactacctcggatctcgggatcacttcgccctcgataggccctctgagacccacgccgattatctgttacgcaccgggcaggtggtggacatctctgataccatctatccaagaaacccagcaatgtactccgaggaggctagactaaagtcattccagaattggcctgactatgcacacctaactccacgagagctcgcaagcgcaggcctgtactacacaggcattggggatcaggttcagtgcttctgttgcggcggcaaattaaagaattgggaaccctgcgatagggcttggtctgagcatagaaggcactttcctaactgcttttttgtgctgggacgcaatctgaacatacgctccgagtctgatgctgtttcttccgatcggaacttccccaactccactaacctgcccagaaacccaagtatggctgactacgaagcccggatcttcacatttggcacatggatttattccgtgaataaggagcaactagcaagggctggcttttacgccttaggtgaaggggacaaggtgaaatgttttcactgtggaggcggtttaacagactggaagcccagtgaagacccctgggaacagcacgccaagtggtaccctggctgtaaatacctactcgagcaaaagggtcaggaatacatcaacaatattcacttaactcacagtcttgaggaatgtctggtgcgcacaaccgaaaagacaccctccctgaccaggcgaatagatgatacaatattccagaatccaatggtgcaagaggccataagaatgggatttagcttcaaggacatcaaaaaaataatggaggagaaaatacagatctccggcagtaactacaaaagcttggaagtgcttgtagctgaccttgttaacgcacagaaggactcaatgcaagacgagtccagccaaacaagcctgcaaaaggagatttctaccgaagaacagcttagacggctacaggaagagaaactgtgcaaaatctgcatggaccggaacatcgcaatagtgttcgtgccatgcggtcatttagtgacctgtaagcagtgtgcagaggctgttgacaaatgccccatgtgttatactgttattacctttaagcagaagattttcatgagt

SEQ ID NO: 33855 - DNA, 1491 bp, synthetic construct
  misc_feature 1..1491: note = Description of Artificial Sequence: Synthetic coding sequence
  source 1..1491: mol_type = other DNA
atgaccttcaactcattcgaaggttccaagacctgcgtgccggccgacatcaataaggaggaggaattcgttgaggaattcaatcggctgaaaaccttcgccaattttccgtccggatcgccggtcagtgccagcactctggcacgcgctgggtttctttacacgggggagggcgataccgtccggtgcttttcatgccatgccgccgtggataggtggcagtacggagattccgctgtcggaaggcaccggaaagtgtccccaaactgccgcttcatcaatggattttacctcgagaattcagccactcagtcaaccaactcaggcatccagaacggtcaatacaaagtggagaattacctgggatcgcgggaccacttcgcgttggaccggccatccgaaactcacgcagactacctgcttcgtaccggacaggtggtggatatctcggacaccatctacccgcgcaaccctgcaatgtactcagaagaagctcggctcaagtctttccagaactggccggactacgcccacctcaccccacgcgagctggcgtcagcgggcctttactacaccgggatcggggaccaggtccagtgcttctgttgcggcggaaagctcaagaactgggagccgtgcgaccgggcatggtccgagcataggcggcactttccaaactgttttttcgtgctgggtagaaacctgaacatccggtcggaatcggacgccgtcagctccgacaggaacttcccgaactcgaccaatctgccacggaacccatcgatggctgactacgaagctaggatcttcacctttgggacctggatctactccgtgaacaaggaacaactcgcccgagccggattctatgccttgggggaaggcgacaaggttaaatgcttccattgtggaggaggacttacggattggaagccgtcagaggatccttgggaacagcacgctaagtggtacccgggatgtaagtacctgctggaacagaaggggcaggaatacattaacaacatccacctcactcatagcctcgaggagtgcctggtcagaaccaccgaaaagaccccttcgttgacccggcgcattgacgatacgatctttcaaaacccgatggtgcaggaggcgattcgtatgggcttctccttcaaggacattaagaagatcatggaggagaagatccagatttcaggaagcaattacaagtcgctggaggtcttggtggcggatctggtgaatgcacagaaggactcgatgcaggatgaatccagccagacttccctgcaaaaggaaatctccactgaggagcaactgcgccggttgcaagaagaaaagctgtgtaagatctgcatggaccgcaacatcgcaatcgtgttcgtcccatgcggccacttggtcacgtgcaagcagtgtgcagaagcggtggacaagtgcccgatgtgctacaccgtgatcacgttcaaacagaagatcttcatgtct

SEQ ID NO: 33856 - DNA, 1491 bp, synthetic construct
  misc_feature 1..1491: note = Description of Artificial Sequence: Synthetic coding sequence
  source 1..1491: mol_type = other DNA
atgacgtttaattctttcgaggggtccaaaacttgcgtgccagccgacattaacaaggaagaagaattcgtggaagagttcaaccgtctgaagacatttgccaacttcccaagtggtagtccagtgagcgctagcaccctggctcgtgctgggttcctgtacaccggcgagggcgacaccgtgcgctgcttctcctgccacgccgcggtggataggtggcagtacggagattctgcagtaggtaggcaccgcaaggttagcccgaattgtcgctttattaacggtttttacctcgagaatagcgcaactcagagcacaaattctggcatccagaacggtcagtataaggtcgaaaattacctcggcagcagagatcattttgctctggacagaccaagcgaaacccacgctgactacctgctgcgtaccggccaggttgtggacatttcggatacgatttacccgcgaaacccggcaatgtattcagaagaggcacgactgaagtcgttccagaattggccggattatgcgcatctgaccccccgtgagctcgcctcagcgggactctactataccggtatcggggatcaggtgcagtgcttctgctgcggcggtaaactcaaaaattgggaaccatgcgaccgggcctggtcggagcatcggcggcactttccaaattgctttttcgtgctgggtcgaaaccttaatatccgtagcgagagcgacgccgtgtctagcgacagaaatttccctaactctactaatctgccgcggaacccaagcatggcggactatgaggcgcgtatatttacttttggtacctggatctattcagtcaataaggagcagctggcccgcgccggattttatgcgctgggtgagggcgacaaagtcaagtgctttcactgcggcggcggtctaaccgattggaagccgtccgaagatccgtgggagcagcatgcgaagtggtatccaggttgcaaatacctgttggagcagaaaggacaagagtacattaataacattcatctgacgcatagcctggaagagtgcctggtgcgaactaccgaaaaaacgccgtctctgacccgtcgaatcgacgatactatctttcagaatcctatggtccaggaggctatccgcatgggcttttcctttaaggatatcaagaaaattatggaggaaaagattcagatcagcggcagtaattataagagcttggaggtgctggttgctgacttggtaaacgctcagaaagactcaatgcaggacgagtcgagccagacatccctgcaaaaagaaatcagcaccgaggagcaactccgccgtttgcaagaggagaaattgtgtaagatttgtatggaccgcaatattgctatcgtgtttgtgccatgtgggcacctggtgacgtgtaaacaatgtgcggaggccgttgataagtgcccaatgtgctatacagtgattactttcaaacagaagatctttatgtcg

SEQ ID NO: 33857 - DNA, 1491 bp, synthetic construct
  misc_feature 1..1491: note = Description of Artificial Sequence: Synthetic coding sequence
  source 1..1491: mol_type = other DNA
atgacctttaactcgtttgaaggctctaaaacgtgtgtcccagcagatatcaacaaggaagaagaattcgtggaagagtttaatcgcctcaagaccttcgcaaactttccttcggggtcgcccgtcagcgcaagcacgcttgctagagcaggctttctttacaccggagaaggagataccgtgcgttgtttctcctgccacgcagcagtggatcgttggcagtacggtgacagcgcagtgggtcgccatagaaaggtgagcccaaactgtcgctttatcaatggattctacctcgagaattccgcgacccaatcaaccaacagcggtatccagaatggacaatacaaggtcgaaaactacctgggatcgcgtgatcactttgctctcgaccggccatctgaaactcatgcagattacctcctccgcacgggtcaagtggtggatatctcggataccatctaccctagaaatcctgcaatgtactccgaagaagcaagactgaagtctttccaaaactggccagactacgcacaccttactcctcgggaacttgcctccgcaggactctattacaccggaattggcgaccaagtgcagtgtttttgctgtggcggcaaacttaagaattgggagccatgcgacagagcctggtccgagcaccggaggcacttccctaactgttttttcgtgttgggacggaatctcaatatccggtccgagtccgacgcggtttcatcagacaggaattttcccaattccactaatttgccaagaaatccttccatggcagactacgaagcaagaatcttcactttcggtacttggatttactccgtgaacaaggagcaacttgctcgcgcaggattttacgcactgggtgaaggggataaggtcaagtgttttcattgcggtggtggtcttaccgattggaaaccttcggaagatccttgggagcaacatgccaagtggtaccctggctgtaaatacctgctggagcaaaagggacaggaatacattaacaacattcaccttactcactccctggaggagtgtttggtgcgcactaccgaaaagactccctccctgaccaggaggatagacgataccatttttcaaaacccgatggttcaagaggcaattaggatgggattctctttcaaggatatcaagaagattatggaagaaaagatccagatctcgggatcgaactacaagtcgctggaagtgcttgtggctgatctggtgaatgcacaaaaagattcgatgcaagatgaatcgtcacaaaccagcctccaaaaagaaatttcaacggaggagcagctcagaagattgcaagaagagaaactttgcaagatctgcatggaccggaacatcgcaattgtctttgtgccttgtggtcatctggtgacctgtaagcagtgtgcagaggcagtggacaagtgccccatgtgttacacggtgataactttcaagcaaaagatcttcatgtcc

SEQ ID NO: 33858 - DNA, 1491 bp, synthetic construct
  misc_feature 1..1491: note = Description of Artificial Sequence: Synthetic coding sequence
  source 1..1491: mol_type = other DNA
atgactttcaattctttcgaggggtcaaagacttgcgtgccggccgacattaataaagaagaagagttcgtcgaggagttcaatcggctgaagacgttcgctaactttcccagtgggagccctgtgtccgcctccacccttgctcgggctggcttcctgtataccggggagggagataccgttcgctgcttttcatgtcacgctgccgtagatcggtggcaatacggcgactcagccgtgggacgccataggaaggtgagtccaaactgtcgctttattaatggattctacctggagaactcagccacccagtccactaactccggaattcagaatggacaatacaaggtggagaattaccttgggtctagagatcactttgcgctagaccgcccatccgagacccatgccgactatctcttacgcacagggcaggtggttgacatttctgatacaatctatcctcgcaaccccgccatgtatagcgaggaagcaagactgaagtcttttcagaattggccagactatgcacatttgacgcccagagagctggccagtgctggcctttactatactgggatcggtgatcaggttcagtgtttctgttgcggtggcaagctgaaaaactgggaaccctgcgacagagcatggagtgagcacagacgccattttcccaactgctttttcgtgcttggccgcaatctgaatatccggtctgagtcagatgccgtttcttctgacagaaattttcccaactcaacaaacttgccgaggaacccttccatggcagactacgaggccaggatttttacttttggtacatggatttatagtgttaataaggaacagctggcccgagcaggcttctacgctctcggggagggggataaggtgaagtgttttcactgcgggggcggcctgactgactggaagccctctgaagacccttgggagcagcacgccaagtggtacccaggatgcaagtacttgctcgagcagaaggggcaggaatacatcaataatattcacctgactcactccctggaggagtgcctcgttcggactaccgagaagactcctagtttgaccagaaggatcgatgacacaatttttcagaaccctatggtgcaggaagccattcgcatgggtttcagcttcaaggacataaagaagatcatggaagagaagatacagatctctggatcgaattataagagccttgaagtccttgtggccgacctggtcaatgctcagaaggatagtatgcaggatgaatcctcacagacatcgttgcagaaggagatctctaccgaggaacagctccgacggctgcaagaagaaaaattatgcaagatctgtatggacagaaatatagcaattgtattcgtcccatgtgggcaccttgtgacttgcaaacagtgcgcggaggcggtggataaatgtccaatgtgttataccgtcatcacttttaagcaaaagattttcatgagt

SEQ ID NO: 33859 - DNA, 1491 bp, synthetic construct
  misc_feature 1..1491: note = Description of Artificial Sequence: Synthetic coding sequence
  source 1..1491: mol_type = other DNA
atgaccttcaacagcttcgaagggtccaaaacctgtgtgcccgctgatataaataaagaggaggaattcgtcgaggagtttaacaggctcaaaacctttgcaaacttcccatccggatctcctgtttcggcgtctactttagcccgtgcaggattcttgtacactggtgagggcgacactgtgcgttgcttttcttgccatgccgccgtcgacagatggcaatacggagacagcgccgtgggacggcatagaaaagtatctcctaactgcagattcatcaatggcttttatctggaaaattccgccactcagtcaactaactctggaattcagaatggccaatacaaggttgagaactatctgggctctcgtgatcattttgcgctggatcgaccctccgagacacacgccgattacctccttcgcactgggcaggtggtggatatctctgacacaatttacccccgaaaccctgctatgtacagtgaggaggcaagattgaagagcttccagaattggcccgattacgcacacttaaccccgcgcgaactggcatcagccggcctctattacaccggcattggcgatcaggtgcagtgtttctgctgtggaggcaagctgaagaattgggagccttgcgatcgtgcctggagcgaacatcgccggcatttcccaaattgttttttcgtcctcggaaggaacctgaacattagaagtgaatccgatgctgtgtcatctgatcgcaacttcccgaattctacgaacttgcctcgcaacccctcaatggccgattatgaagcccgaatatttacttttggtacgtggatctacagtgtgaataaggagcagttggcacgcgcaggcttctacgcattaggagaaggcgacaaagttaaatgctttcactgcgggggtggccttactgattggaagccatcagaggatccatgggagcagcacgccaagtggtacccagggtgcaagtatcttctggagcagaaaggtcaggagtacataaataacatacacttgacacacagcctggaggagtgcttggtgcggacgacagaaaagactccgtccctgacaaggcgaatagacgatactattttccagaaccccatggttcaggaggcgatccgaatgggcttttcctttaaggacatcaaaaagatcatggaagaaaagattcagattagcggtagtaattataaatccttggaggtgctagttgcagatttggtcaacgcccagaaggattcaatgcaggacgagtcctcacaaacaagcttgcaaaaagaaatatcaacagaggagcagctgagacggctccaggaggaaaagctttgcaagatctgtatggatcgcaacattgcgatcgtgtttgtgccctgtggccacttggtaacttgtaagcagtgcgctgaagctgtggataagtgcccaatgtgctatacagtcattacctttaagcagaaaattttcatgtct

SEQ ID NO: 33860 - DNA, 1491 bp, synthetic construct
  misc_feature 1..1491: note = Description of Artificial Sequence: Synthetic coding sequence
  source 1..1491: mol_type = other DNA
atgacctttaactcctttgagggtagcaagacttgcgtgccagccgatatcaataaagaggaggaattcgtggaggaattcaaccgcctgaaaactttcgcgaattttccatccggaagccccgtgtctgcatcaactcttgcaagggcaggcttcctttacactggtgagggtgacacggtgcgctgcttttcgtgtcatgcggcggtcgacaggtggcagtacggagatagcgcagtcggccgccatcggaaagtgtccccaaattgtcggttcataaacggattttacctggagaactccgcaactcagtcgaccaattcggggatacagaatggtcagtataaggttgaaaactacctgggatccagggaccattttgcactcgatcggccttccgaaactcacgcagattacctgctgcggaccggtcaagtggtggacatcagcgacactatttacccacgcaacccagcgatgtactcggaagaggcccgcctcaagagctttcaaaactggccggactacgcacatctcacccctcgagagcttgcgagcgccggactttactacacgggcattggtgaccaagtccagtgtttctgttgcgggggaaagctcaagaactgggaaccctgcgatagagcatggagcgaacacagacgtcatttcccaaactgcttttttgtgcttggacggaacctcaacatccgttccgaaagcgatgcggtgagctcggaccgcaattttcctaactccactaacctcccccggaacccgtcaatggccgactacgaggccagaatctttacctttggtacgtggatttactcggtgaacaaagagcagctcgcccgggcagggttctacgcactcggggaaggagataaggtgaagtgctttcattgcggtggtggacttaccgactggaagccgagcgaagatccttgggagcaacatgccaagtggtacccaggctgtaaatacctgcttgaacaaaagggacaagagtacattaacaatatacatcttacccattcactggaggaatgtctcgtccgcaccaccgaaaagaccccaagccttacgagacgcattgatgataccatcttccaaaacccaatggtgcaagaggcgataaggatggggttcagctttaaagacatcaaaaagataatggaagagaagattcagatctcagggtcaaactacaagtcattggaagtgctggtggcagacctggtcaatgcccagaaggattcgatgcaggacgaatcgagccaaacgtcactccaaaaggaaatctcgaccgaggagcaactgcgcagactgcaggaggaaaagctctgtaagatttgcatggataggaatattgcgattgtctttgtgccttgtggtcaccttgtgacttgtaagcaatgtgcagaagctgtggataagtgtccgatgtgctacaccgtgattacgtttaaacaaaagatcttcatgtcg

SEQ ID NO: 33861 - DNA, 1491 bp, synthetic construct
  misc_feature 1..1491: note = Description of Artificial Sequence: Synthetic coding sequence
  source 1..1491: mol_type = other DNA
atgacgttcaattcttttgaggggtcaaaaacttgtgttccagcagacataaacaaagaggaagagttcgtggaagaattcaacagattgaaaacttttgcaaattttccgtcaggatcccctgtgagcgcttcaacattggcaagagctggctttctgtatacaggagaaggagatacagttcgttgtttctcctgtcacgccgccgttgatagatggcagtatggagattcagctgtaggacgacatcggaaggtgtccccaaattgtcgtttcattaacggattttatctagaaaattctgccacacaatctactaacagcgggatacagaatggtcaatataaggtcgaaaattatttgggaagtagagatcattttgctcttgaccgaccaagtgaaacacatgccgattatttgctacgaactggacaagtggtagatatttcggatacaatttatccaaggaatccggctatgtactccgaggaagcacgacttaagagttttcaaaactggccagattatgctcacctcactccgagagagcttgcatcggcaggattgtattacactggaattggtgaccaagtccaatgtttctgttgtgggggtaaactcaaaaattgggagccatgtgatcgcgcgtggagtgaacatcgtcggcactttccaaattgctttttcgttctcggtaggaatttgaacattcgatctgagagcgatgcagtttcatccgaccggaacttcccgaacagcacaaatctcccacgaaatcccagtatggcggattatgaagcccgtatctttacatttggtacatggatttattcagttaacaaggaacagttagcacgagcaggtttttacgcactgggagaaggagataaggtgaagtgctttcattgcggtggtggattgactgattggaaaccatcagaggatccatgggaacagcatgctaaatggtatccaggctgtaaatatttgctcgaacaaaagggccaagaatacatcaacaatattcaccttacccactctttggaggaatgtcttgtccgaactaccgaaaagactccaagccttacaagaaggattgatgatactatctttcaaaatccaatggtacaagaagcaattcgaatgggtttttctttcaaggatattaagaaaatcatggaagagaaaatccaaatttccggatctaattataaaagcctcgaagttttggtggccgatttggttaatgctcaaaaggacagtatgcaagatgagtcatcgcagacttctttacaaaaggaaattagtacggaagagcagcttcgtcgacttcaggaagagaagctatgcaaaatatgtatggatcgaaatatcgctatcgtttttgtgccatgtggacatcttgtcacctgtaaacaatgcgctgaagctgttgataagtgccctatgtgctatacggttattacttttaagcaaaaaatctttatgtcc

SEQ ID NO: 33862 - DNA, 1491 bp, synthetic construct
  misc_feature 1..1491: note = Description of Artificial Sequence: Synthetic coding sequence
  source 1..1491: mol_type = other DNA
atgacatttaactcgtttgaaggctctaagacgtgcgtccccgctgacatcaacaaggaagaggaatttgtagaggaattcaatcgcctaaaaaccttcgcaaacttccccagcggatcacccgtgtcagccagcacactagctagagcagggtttttgtatactggcgaaggcgacacggtcaggtgtttttcctgtcatgccgctgttgatcgatggcaatacggcgactcagccgtgggccgccacaggaaggtttcacctaactgccgttttataaacggattttacttagaaaacagtgcaacacaatctacaaactcaggaatacaaaacggtcaatacaaggtcgagaactatctggggtctagggaccactttgccttggataggcctagcgagacacacgcagactatctgctacgaactggccaggtcgtggatatatccgacactatttatccccgcaacccggctatgtacagcgaagaagctcggctgaagagcttccagaactggcctgactacgctcatctcacgcccagagaactggcatccgctggtttgtactatacaggaatcggcgaccaggtgcaatgtttctgctgcgggggtaagcttaaaaattgggagccgtgcgatagggcttggagtgagcatagacgtcatttcccaaattgtttttttgtcctggggaggaacctcaacattcgcagcgagtcagacgccgtgtcttctgaccgtaattttccaaacagtacaaacctaccgcgcaaccccagcatggccgattacgaagcccggatttttacttttggcacgtggatctactcggtcaacaaagagcaattagcacgggcaggattctatgctctgggagagggcgacaaagtcaagtgctttcattgcgggggcggacttaccgattggaagccctccgaagatccgtgggaacagcatgcgaagtggtatcccggctgcaagtatctactagaacaaaaggggcaagaatatattaacaatatccacctgacacactcccttgaggaatgcctggttagaacaactgagaagacgccgtcccttacacggcggatagacgacaccatctttcagaacccaatggtacaagaggccatcagaatggggtttagttttaaagacattaaaaagatcatggaggagaagatacaaatatctgggtccaactacaagtcactggaagtcctggtggccgatctcgtcaacgctcagaaagatagcatgcaggacgaaagctcacagacgagcctccagaaagagatcagcacggaggaacaactgagacggctgcaggaagagaagctgtgtaaaatttgtatggaccgaaacatagctatagtgttcgtaccatgcggccacctggtgacctgtaagcagtgcgccgaagctgtggataagtgccccatgtgttatacagttatcaccttcaaacaaaaaatctttatgagc

SEQ ID NO: 33863 - DNA, 1491 bp, synthetic construct
  misc_feature 1..1491: note = Description of Artificial Sequence: Synthetic coding sequence
  source 1..1491: mol_type = other DNA
atgactttcaactcctttgagggatcaaagacgtgcgtgccggctgacattaacaaagaggaagagttcgtcgaggagttcaacaggctcaagacatttgctaacttcccgtctgggtcgccagtgtcagcgagtactctagcaagagcggggttcctatacacaggagagggcgacaccgttagatgcttctcatgccatgctgcagtcgatagatggcaatatggtgactccgccgtggggcggcaccggaaagtgtcacctaactgtagattcattaatggtttctatctggagaactctgcaacgcagtcaactaactcggggatacaaaacgggcagtataaggtggagaattatctcggttcaagagatcacttcgccctggacaggcccagcgaaacccacgccgactacctgttgagaacaggacaggtggtggatattagcgatacaatctatccgaggaatcctgccatgtactcagaagaggcaaggctgaaatcttttcagaactggcccgattatgctcacctgacccctagggagctggcctccgcaggtttgtattatacaggcattggcgatcaggtccagtgtttttgttgcggaggcaagttaaagaactgggagccttgtgaccgcgcctggtcagagcacagaaggcacttccctaactgcttctttgtgctggggcggaatctgaatatccgatccgagagtgatgccgtcagcagcgataggaatttccctaactctactaacctgcctcggaatccaagtatggcagattatgaggccaggatcttcacattcggaacttggatttactccgtgaataaagaacagttagcccgcgccggattctatgctctcggtgaaggggacaaagtgaaatgttttcactgtggtggaggcctcactgactggaaaccttcggaagacccctgggagcagcatgcgaagtggtaccctgggtgtaagtacttgctagagcagaaaggccaggaatatatcaataacattcatctcacacattcactggaagagtgcctcgttcgtaccaccgagaagacacctagcctgacgagacgaattgatgatacaatcttccagaaccccatggtgcaggaagcaattagaatgggcttctcattcaaggatatcaagaagattatggaggagaagattcagatctcgggctctaattataagtcgctggaggtactggtggccgatttggtgaacgctcagaaggattctatgcaagacgaaagttctcagacctccctgcagaaagaaatctccactgaggagcagctgaggagacttcaggaggagaagctgtgtaagatttgtatggacagaaacattgcaatcgttttcgttccttgtggacatttggtcacctgcaagcagtgcgccgaagcggtggacaaatgccctatgtgctacacagtgattactttcaagcaaaaaatatttatgtca

SEQ ID NO: 33864 - DNA, 1491 bp, synthetic construct
  misc_feature 1..1491: note = Description of Artificial Sequence: Synthetic coding sequence
  source 1..1491: mol_type = other DNA
atgactttcaactcgttcgagggctctaagacatgtgtgccggctgacattaacaaggaggaggaatttgtcgaagagttcaatcgcctgaagaccttcgcaaatttcccctcaggctcgccggtgtccgcctccacgctcgcccgagcggggtttctgtacacaggggagggggacactgtccggtgcttctcatgtcatgccgccgtggaccggtggcagtacggtgacagcgctgtcggacgacatcgcaaggtctcccccaactgccgtttcattaacggtttctatttagagaattccgcgacacagagcacgaactccggtatacagaacggccaatataaggttgagaattacctggggagccgtgatcacttcgctttggaccgcccatcggagacgcacgccgattacctgctgaggactggccaggtggtggatatctccgacaccatttacccgcgcaacccggctatgtactcagaagaggcacgcctgaagtcctttcagaattggccagactatgcacatctgacgcccagagaactggcctcagccggtctgtactatactggaataggcgatcaagtacagtgcttttgctgtggcggcaagctaaagaactgggaaccgtgcgaccgcgcgtggtcggagcaccgacgacacttccctaattgttttttcgtgctgggcagaaacttaaacatacgtagtgagagtgatgccgtctcttcggatcggaatttcccaaacagcaccaacttacctcgcaatccatcgatggccgactatgaagcgcggatcttcactttcggaacatggatatactccgtaaacaaggagcaactggctcgagccggtttttacgccctgggcgagggtgataaggtcaagtgcttccactgcggcggaggtctgactgactggaaaccatctgaggatccctgggagcagcatgccaaatggtatcccggctgcaagtacttactggagcagaagggccaggagtacatcaataacattcatctgacccacagcctagaggagtgcctcgttcgcacgactgaaaaaaccccctccctgacgcgtcggatcgatgatacgatcttccagaatccgatggtccaggaggcgatcaggatgggcttcagctttaaggacatcaaaaagatcatggaggagaaaatccaaatttccggcagcaactacaagagcctggaggtccttgtagcggacttggtgaacgcgcagaaggattcgatgcaggacgagagcagccaaaccagcctgcagaaggagatttcgactgaggagcaactgagaaggctgcaagaggagaaattgtgcaaaatctgcatggatcgtaacattgccattgttttcgtcccttgtgggcatctggtgacatgcaagcagtgcgccgaggctgttgataagtgtccgatgtgctataccgtgatcaccttcaagcaaaagattttcatgtca

SEQ ID NO: 33865 - DNA, 1491 bp, synthetic construct
  misc_feature 1..1491: note = Description of Artificial Sequence: Synthetic coding sequence
  source 1..1491: mol_type = other DNA
atgacctttaactcgttcgaaggttctaagacgtgcgtgccagcagatatcaacaaagaggaagagtttgttgaagaattcaacaggcttaagacgttcgccaattttccctcgggctccccagtgagcgcaagcaccctcgctagagccggatttctgtacactggcgaaggagataccgtccggtgcttcagctgccatgccgccgtcgacagatggcaatacggggattccgcagtgggtcggcatagaaaggtgagccccaattgtcgtttcattaacggattttacttggagaattcggccactcagtcgacgaactcaggcatccaaaatggacagtacaaggtggagaactacttgggatcgagagatcactttgccttggaccgaccttccgaaactcatgcggattacctgctgaggaccggtcaagttgtcgatatttccgatacgatttaccctcggaatcctgcaatgtacagcgaggaagcgagacttaagtcgtttcaaaactggccagattacgcccatcttaccccacgtgaattggcctcagctggcctgtactacactggaattggcgatcaggtgcagtgtttctgctgtggtggaaaactgaaaaactgggaaccttgcgacagggcatggtcagagcaccggcgacactttccgaattgctttttcgtgcttggacggaaccttaacattcgatcggagtcagatgccgtgagctcagaccggaactttcctaactcgaccaaccttccacgcaatccttcaatggcagattacgaggcacggattttcacctttggtacctggatttactcggtgaacaaggagcagctcgcaagggctggattctacgcgctcggagaaggagataaggtgaaatgctttcactgtggcggggggcttaccgattggaaaccgagcgaggacccctgggagcaacatgcaaagtggtacccgggttgcaagtacctgctggaacagaagggtcaagaatacattaacaacatccatcttactcattccctcgaagaatgtctggtgcgtacgaccgaaaagacgccctccctcactcgcagaattgacgataccatcttccagaaccccatggtgcaagaagccattaggatgggattctcctttaaagatatcaagaaaatcatggaagagaaaattcagatttcaggttcgaattacaagtcactggaagtgctggtggcagaccttgtcaacgcccaaaaggattctatgcaggacgaatcgagccagacttcactgcaaaaggaaatcagcactgaagagcaactccgtcggctgcaggaagagaagctgtgtaagatatgtatggatagaaacatcgccatcgtgtttgtgccctgtggacatctggtcacttgcaaacagtgcgctgaagcagtggataagtgtccaatgtgttatactgtgattacctttaagcaaaagatctttatgtca

SEQ ID NO: 33866 - DNA, 1491 bp, synthetic construct
  misc_feature 1..1491: note = Description of Artificial Sequence: Synthetic coding sequence
  source 1..1491: mol_type = other DNA
atgacctttaacagctttgaaggatctaagacgtgtgtcccagctgacataaacaaggaagaagaatttgtggaggaattcaacaggcttaagacttttgcaaatttcccttccggatcacctgtgtcggcttcgactcttgcacgagcaggcttcctttacactggagagggggataccgtgagatgtttcagctgccatgcagccgtggacagatggcagtacggagattcggcagtgggacggcatcgcaaggtcagccctaactgtaggtttatcaacggattttaccttgaaaactccgccacccaatccactaacagcggaattcagaatggacagtacaaagtggaaaactacctggggagccgcgaccacttcgcccttgatcgaccatcagaaactcatgcagattacctccttcggactggccaggtcgttgatatttcggataccatttacccccgtaatccagcaatgtattcagaagaggcacggctgaagtcctttcagaattggccagattacgcgcacctgaccccccgggagctggcttcagcaggactgtactacactgggatcggtgatcaggtccaatgtttttgttgcggagggaaacttaagaactgggagccatgtgatagagcatggtccgagcataggagacattttccgaactgcttttttgtgctgggacggaacctcaatattcggtcagaatctgacgcagtgtcctcggatagaaactttcctaattccactaaccttcctcgtaatcccagcatggcggactacgaagccaggatctttactttcgggacctggatatactcggtcaacaaggagcaacttgcacgcgccggattctacgcactgggtgagggtgataaagtgaagtgttttcactgtggtggaggccttaccgattggaagcctagcgaagatccatgggaacagcatgcaaaatggtacccaggttgcaaatacttgctggaacaaaagggtcaagaatacattaacaatatccaccttactcactcccttgaagagtgtctggtgcgtaccactgagaaaactcctagcctcaccagaaggattgatgacacgatttttcagaaccctatggtccaagaagccatccgaatgggattctcgtttaaggatatcaaaaagattatggaggaaaagatacaaatttcgggctcaaattacaaatcccttgaagttctggtggcagatcttgtgaatgcacaaaaggattccatgcaagatgaatcgtcgcagacctctcttcaaaaggaaatctcaacggaagaacaacttagacgactccaggaagaaaaactctgtaagatatgtatggatcgcaatatcgcaatagtttttgtcccatgtggtcacctcgtgacttgtaagcagtgtgcagaagccgtggataaatgcccgatgtgctacacggtgattacctttaagcagaagatctttatgtca

SEQ ID NO: 33867 - DNA, 1491 bp, synthetic construct
  misc_feature 1..1491: note = Description of Artificial Sequence: Synthetic coding sequence
  source 1..1491: mol_type = other DNA
atgacattcaactcatttgagggcagtaagacatgcgtgcctgcggatattaacaaggaggaagaattcgttgaggaatttaatagactgaaaacatttgcgaactttccgagcggctcacccgtcagtgcgtcaaccctggcccgagctggctttctatacactggcgagggcgacacggtacggtgtttttcctgccacgccgccgttgatcgctggcagtacggcgactctgcagttggccgacacaggaaggtgtcccctaattgtcgattcatcaacggcttctacctggaaaacagtgccacacaaagcaccaactctggaattcagaatggacaatacaaagtcgaaaactatcttggatcaagagaccactttgccctcgacaggccttcggaaacccacgctgattacttgttgcgaacgggacaggtggtggatatatccgacaccatttacccacgaaacccagctatgtatagtgaagaggcgcgtcttaaaagctttcagaattggcccgattacgctcatctgacaccccgagagctggcctccgcagggctgtattacacaggcatcggtgatcaagtgcaatgcttctgctgcggcggaaagctcaagaattgggaaccctgtgacagagcctggagcgagcatagacgacactttcctaactgtttttttgtgctcggtagaaatctgaatataaggagcgaatcagacgcagtctcgtctgacagaaactttcccaattcaacgaaccttcctaggaatccctctatggctgactacgaggccaggattttcacattcggcacgtggatctattctgtgaacaaggagcagctggctagggcagggttttacgccctcggcgagggagacaaggtcaagtgtttccactgtggtggcggactcacggattggaagccgtccgaggacccatgggaacagcacgccaaatggtatcctgggtgcaaatatttgctggaacaaaaagggcaggagtatatcaataatatacacctgacccatagcctcgaggaatgcctggtaagaacgactgagaagaccccatccctgactaggcgcatagacgatacaatcttccagaaccctatggtgcaggaagctattagaatgggtttcagctttaaagacataaaaaaaatcatggaggaaaagatccagatatcgggatccaattataaaagcctggaggtgctagtagcagatctcgtgaatgctcagaaggacagcatgcaggatgaatcaagtcagacttctctgcagaaagaaatctccaccgaggaacagctgaggcgcctccaggaagagaagctctgtaagatttgcatggatcgaaacatagccatcgtgttcgtgccatgcggacatttagtgacgtgcaagcagtgcgcggaagccgtcgacaagtgtcccatgtgctataccgtcatcacctttaaacagaagatcttcatgtct

SEQ ID NO: 33868 - DNA, 1491 bp, synthetic construct
  misc_feature 1..1491: note = Description of Artificial Sequence: Synthetic coding sequence
  source 1..1491: mol_type = other DNA
atgacctttaactcattcgagggcagcaagacttgcgtcccggcggacataaacaaagaggaggagtttgtggaggagttcaataggctgaaaactttcgccaatttcccgtccggttcaccggtgagcgcctcgaccctggcgagagcaggattcttgtacaccggggaaggagacaccgtccgctgcttttcgtgccacgccgccgtggacagatggcagtacggtgacagcgccgtgggacgtcatcgaaaagtgtcgcccaactgccgcttcatcaatgggttctatctggaaaattccgcgactcagtctaccaactcaggaattcaaaacgggcaatacaaagtcgagaactacctcggatcacgcgatcacttcgcgctggaccgcccatcggagactcatgctgactacctgcttcgcactggccaggtggtggatatttctgataccatctaccctaggaatccggccatgtactcagaagaagcccggctgaagtccttccagaattggccagattacgcgcatctcaccccgcgggaactggcgtcagccggactctactacactgggatcggggaccaagtgcagtgcttctgctgcggcggtaaactgaaaaactgggagccatgcgatcgcgcatggtccgagcatcggagacacttcccgaactgctttttcgtgcttggaaggaacttgaatatccggtccgaatcggacgcagtgtccagcgacaggaatttcccgaattcgactaatctcccgcgcaacccgtctatggccgattacgaagcgagaatcttcactttcggaacctggatttactcggtgaacaaagaacaactcgcacgcgcgggcttctatgccctcggagaaggagacaaggttaagtgttttcactgcggtggaggactgaccgactggaagcccagcgaggacccgtgggaacaacatgcgaaatggtacccgggctgcaagtacctcctcgaacagaaaggccaggagtacattaacaacatccatctcactcattcccttgaggagtgcctggtgcggactactgaaaagaccccgtcgctgactcggcggatcgatgacaccatcttccagaatccaatggtgcaggaggcaatcagaatgggtttctcgtttaaagatatcaagaagatcatggaggagaagatccagatttcaggatccaactacaaatcccttgaggtgctggtcgccgacctggtgaatgcacagaaggattccatgcaggacgaatcctcccaaacctcactgcagaaggaaatctccactgaggaacaactgcggcggctccaagaagaaaagctgtgcaagatttgtatggatagaaatatcgctatcgtgttcgtcccatgtggacatctggtgacgtgcaagcagtgcgccgaagccgtggacaagtgtccaatgtgctacaccgtcatcacctttaagcagaagatcttcatgagc

SEQ ID NO: 33869 - DNA, 1491 bp, synthetic construct
  misc_feature 1..1491: note = Description of Artificial Sequence: Synthetic coding sequence
  source 1..1491: mol_type = other DNA
atgacttttaacagttttgaggggtctaaaacttgcgtgcctgctgacattaataaagaagaagaattcgtggaagagttcaatcgtctaaagacctttgcaaatttcccttcggggagccctgtcagcgccagcacacttgctagagccggattcctctataccggcgagggagataccgtccggtgcttctcgtgccacgctgcagtggacagatggcagtatggggattcagcagtcgggagacaccggaaagtgtctcccaactgccgcttcataaacggtttctaccttgaaaactctgctacacaatctacgaattccggcattcagaatggacaatacaaggttgaaaactatctcggatctcgggaccactttgcactggaccgccctagtgagacccacgcagactatctacttcgcacgggacaagttgtggatataagcgataccatctacccaaggaaccctgccatgtacagtgaagaagcccgcctcaaatccttccaaaattggcctgattacgcccaccttaccccaagggagctggcatcagcaggcttgtactatacaggcatcggagaccaggtacaatgcttttgttgcggaggaaaactaaagaactgggagccttgtgacagggcttggagcgagcataggcggcacttcccaaactgcttcttcgtgttgggaagaaacctaaatatcaggagcgaatctgacgccgtgagcagcgatcgcaacttcccaaactcaaccaacctgccgcgtaatccttcgatggctgattacgaagcacgtatcttcacatttggcacctggatctactccgtgaacaaggaacagctcgctcgggccggcttctatgctctgggggagggcgataaagtcaaatgtttccactgtggaggtggcctgaccgactggaagccctctgaggacccctgggaacaacatgctaagtggtaccccggctgcaaatacctcctggagcaaaagggccaagagtatatcaacaatatacacctcacgcatagcctcgaggagtgcctggtgcgtaccaccgagaagactcctagcctgacaaggaggattgatgacactatctttcaaaaccctatggttcaagaagccatccgtatgggcttcagtttcaaggacatcaagaaaattatggaggagaaaattcagatctctggatccaactataagtctctggaggtcctcgtggccgacctcgtgaacgcacagaaggattctatgcaggacgaaagtagtcagacaagcctgcaaaaggaaatctccactgaagaacagctgaggagacttcaggaggaaaagctgtgtaagatctgtatggatagaaacatcgctatcgtcttcgtgccctgcgggcatctcgtcacctgcaagcagtgcgctgaagccgtggacaagtgtcccatgtgttacactgtaatcaccttcaagcaaaaaatcttcatgtca

SEQ ID NO: 33870 - DNA, 1491 bp, synthetic construct; identical to SEQ ID NO: 33803
  misc_feature 1..1491: note = Description of Artificial Sequence: Synthetic coding sequence
  source 1..1491: mol_type = other DNA

SEQ ID NO: 33871 - DNA, 1491 bp, synthetic construct
  misc_feature 1..1491: note = Description of Artificial Sequence: Synthetic coding sequence
  source 1..1491: mol_type = other DNA
atgaccttcaactcctttgagggcagcaagacctgcgtacccgccgacatcaacaaagaagaggaatttgtggaggaattcaataggctgaagacatttgctaacttcccctccggttctcccgtgtccgccagcaccctggccagagccggtttcctttataccggcgaaggcgacaccgtgaggtgcttctcatgccatgcggcagtagacagatggcaatacggtgactctgctgtcggcagacataggaaggtgtctcctaactgcaggttcatcaatggattttacctcgagaattctgccacacagtctactaactccggtatccagaacggacaatataaggtggaaaattacttgggaagccgagatcacttcgccctggataggccatcagaaacgcacgcagactacctgctccgcaccggccaggtcgtggacatttccgacacaatttaccctaggaacccagccatgtattctgaggaggctcgcctgaagtcattccaaaattggccagattatgcgcacttgacccctagggagcttgcaagtgcaggattgtattacacggggataggcgatcaggtgcagtgcttctgttgcggggggaagctcaagaactgggagccctgtgatcgggcttggagtgaacacaggaggcattttcccaactgtttcttcgtgctcgggcgcaacctgaatattagatctgagtcagatgctgtgagttccgaccggaacttccccaattccaccaatctgcctaggaatcccagtatggcggattacgaggcaaggattttcacgtttggcacatggatatacagtgttaataaggagcagctggctcgcgctgggttctacgctctgggcgaaggtgacaaagtgaagtgtttccattgcggcggcggcttgaccgattggaagcccagcgaggatccatgggagcagcacgcaaaatggtaccctggatgcaaatatctgttggagcagaaaggccaggaatatatcaacaacattcatctgactcattcccttgaggaatgcctcgtgcggactactgagaagacaccttccctgacccggaggatagacgacaccattttccagaatcccatggtgcaggaagctatccgaatggggttctcattcaaggacataaagaaaattatggaagagaagattcagatatccggtagcaactacaaatcacttgaggtgttggtggccgacctcgtgaatgcccagaaggactctatgcaggatgaatcatcacagacaagcctgcagaaagaaataagcacagaggagcagctgcggcgcttgcaagaggaaaaactgtgcaagatatgcatggatcgcaacatagctatcgtattcgtgccttgcggacacctcgtcacctgtaaacaatgcgcagaagcagtggacaaatgtccaatgtgctatactgtgattacatttaaacaaaaaattttcatgagc

SEQ ID NO: 33872 - DNA, 1491 bp, synthetic construct
  misc_feature 1..1491: note = Description of Artificial Sequence: Synthetic coding sequence
  source 1..1491: mol_type = other DNA
atgaccttcaactcttttgaagggtcgaagacttgtgtgcctgcagacatcaacaaggaagaggagttcgtcgaggagttcaatagacttaaaaccttcgcaaatttcccttctggatcacctgtgtcggcaagtactctcgctagggctgggttcctttacaccggagaaggcgacactgtgagatgtttttcatgccacgccgcggtggaccgctggcagtatggcgactccgccgtaggccgccaccgcaaggtgtctcccaactgccgttttataaatggattctatttagagaacagtgccacgcagagcaccaactcagggatccagaatggccaatataaggtggaaaattatttggggtctcgcgaccatttcgcgcttgatcgtccatcagagacccatgccgactatctgctgcgtacagggcaggttgtcgatataagcgacaccatatacccccgaaatccggctatgtactcagaagaggccagattgaagagtttccagaattggcctgattatgcacacctgacaccccgagagcttgcgtccgccgggttgtactacacaggcataggagaccaggtccagtgcttttgctgcggcgggaaactcaaaaactgggaaccctgtgacagagcctggagcgaacacaggaggcacttccccaattgctttttcgtgctcggccgcaacttgaacattcgttccgagtctgacgccgttagctccgatagaaactttcctaacagcaccaatctgccgcgcaacccctcaatggctgactacgaggcaaggatcttcactttcggaacttggatttatagtgtgaacaaggaacagctggcgcgggctggattctatgccctgggagagggggataaggtgaagtgtttccattgcgggggcgggctcacagactggaagccgagtgaggatccctgggagcagcacgccaaatggtacccagggtgtaagtatctcctggaacagaaaggccaggaatacataaacaacattcacctgacccactcacttgaagaatgcttggtgagaactacagagaagacaccttcactgacaaggagaatagatgacactatttttcagaatcccatggtgcaagaggctattagaatgggctttagctttaaagacatcaaaaagatcatggaggaaaaaatccagatttccggtagtaattataaatccctagaggtgctcgtagcagatctggtgaatgctcagaaggattctatgcaagatgaaagtagccagaccagcctccagaaggagatctctacagaagagcagttgaggaggctgcaggaagaaaagctttgcaagatttgtatggacaggaacatcgccatagtctttgtgccttgtggccatttggttacctgcaagcagtgtgccgaagctgtggataaatgccctatgtgttacaccgtgatcaccttcaaacagaagatcttcatgtcc

SEQ ID NO: 33873 - DNA, 1491 bp, synthetic construct
  misc_feature 1..1491: note = Description of Artificial Sequence: Synthetic coding sequence
  source 1..1491: mol_type = other DNA
atgacattcaactcattcgaagggagtaaaacttgcgtgcccgccgatatcaataaagaagaagaatttgtagaggaatttaacaggctgaaaacattcgccaattttccctctggatccccagtgtccgcatctacacttgccagagctgggtttctgtatacaggggaaggagatacagtcaggtgtttttcttgccacgcagccgtggaccgctggcagtatggagattctgccgtgggacggcatagaaaagtaagtcctaattgccgattcataaatgggttctacctcgagaattctgccactcagtccacaaactcagggatccagaacggacagtataaagttgaaaattatcttggatctagggatcattttgcccttgacagaccttcagaaactcacgcggattatctgctcagaacagggcaggtggtcgatatctcagatacaatatatcctagaaaccctgcaatgtatagtgaggaagctcggctgaagtcatttcagaattggcccgattatgcccacctgacaccccgggaactcgcttctgctggactctattatactgggatcggagatcaggtgcagtgcttctgttgcggagggaaactgaaaaattgggaaccctgcgatagggcatggagtgagcacagacggcatttccctaactgcttttttgttctcgggaggaatctaaatatacggtctgaatctgatgcagtctcaagtgataggaatttccctaattctactaatttgccacgaaatccttcgatggcagattatgaggctcgaatatttacttttggaacatggatatactcagtcaacaaagaacagctcgcaagggcgggattctatgccttgggggaaggggataaagttaaatgttttcactgcggaggggggctcacagactggaaaccctcagaagacccatgggagcaacatgccaaatggtatcccggatgcaaatatttgctggaacagaaaggacaggagtatataaataacattcacttgacacacagtctggaagaatgtttggttcggacaacagagaagactccatcactaactaggaggatcgatgatacaatctttcagaatccaatggtgcaggaggcaatacggatgggattctcatttaaagacataaaaaaaataatggaagaaaagatccagatttctgggagtaactacaaatccctagaagtactcgtagctgatctcgttaacgctcagaaagattctatgcaggatgagtcgtcacagacttcactccagaaagaaatatctacagaagaacaattaaggcggttacaggaagaaaaactgtgtaagatctgcatggacagaaatatagcaatcgtgtttgttccttgcgggcatctcgtaacttgcaaacagtgtgcagaagccgttgataaatgtccaatgtgctacacagttattactttcaaacagaaaatttttatgtcc

SEQ ID NO: 33874 - DNA, 1491 bp, synthetic construct
  misc_feature 1..1491: note = Description of Artificial Sequence: Synthetic coding sequence
  source 1..1491: mol_type = other DNA
atgacatttaattcttttgaggggtctaaaacatgcgtaccagcggatatcaacaaagaagaggaatttgtggaagaatttaatagattaaaaacatttgcaaatttcccctcaggatccccagtgagtgccagtacattagctcgggctgggtttctctatactggggaaggagatacagtcaggtgtttttcttgccatgccgcagttgataggtggcagtatggagattccgccgtggggagacataggaaagtctctcccaactgccgtttcataaatgggttttacctagaaaactctgctacacagagtactaactctggaatacagaatggacagtataaggtggagaattacctggggtctcgggatcactttgctcttgatcgaccatccgaaacacatgccgactatttactcagaacgggacaagttgtggatatctccgatactatataccctcggaaccccgctatgtattccgaagaagcgagacttaaatccttccagaattggcctgactatgcccaccttactcccagagaactcgcctctgccggactatattatacagggatcggagatcaagttcagtgtttttgctgtgggggaaaacttaaaaactgggaaccctgcgatagggcctggtctgagcaccggcgccattttccaaattgttttttcgttctcggaagaaatctgaatataaggtccgaatctgatgccgtgtcctcagatcggaactttcccaactctactaatcttcctcgaaacccatccatggccgattatgaggcacgaatatttacatttgggacatggatatacagtgtcaataaagagcagctggcacgagccggattttatgctttgggggaaggagacaaagtgaaatgtttccattgcggaggaggattgacagattggaaaccttcagaggatccctgggaacagcacgcaaaatggtatcccgggtgtaaatatctgctcgagcagaaaggacaagaatatattaataacattcacttaactcattctctcgaagaatgcctcgtgcgcacgacagagaaaactccatctttaactcgccggattgatgatacaattttccagaatccaatggtgcaggaggcaatacgcatggggttctctttcaaagatattaaaaagatcatggaggagaagatacagatctctggatcaaattacaaatctctcgaagtgcttgtggctgatctagtgaatgcccagaaagattcgatgcaggatgaaagttcacagacatctcttcaaaaagaaatctctacagaagagcagctcaggagactgcaggaagaaaaactctgcaaaatatgcatggatcgaaacatcgccatagtgtttgtaccatgcgggcatctcgtcacatgtaagcagtgtgccgaagctgtcgataagtgtcccatgtgttatactgtgataacattcaaacagaaaatatttatgtct

SEQ ID NO: 33875 - DNA, 1491 bp, synthetic construct
  misc_feature 1..1491: note = Description of Artificial Sequence: Synthetic coding sequence
  source 1..1491: mol_type = other DNA
atgactttcaactccttcgagggaagcaagacttgtgtccccgccgacattaacaaggaagaagaattcgtggaagaattcaaccgccttaagacgttcgccaatttcccgtcggggagcccagtctccgcatcgaccctcgcccgcgcaggatttctgtatactggagagggtgatactgtccggtgcttttcatgtcatgccgccgtggaccgctggcagtacggggatagcgctgtgggccgccacagaaaagtgtcaccgaattgcagattcattaatggcttttacctggaaaactcagccacccagtccaccaattctggaatccaaaacggccagtataaggtggagaactacctgggctcaagggaccacttcgcacttgatcgcccatccgaaacccatgctgattacctgctccgcactggacaggtagtggatatctctgacactatctatccgaggaacccggccatgtactcggaggaggcacgactcaagtcatttcagaactggccagattacgcacatctcactccacgggaactggcgagcgctgggctgtactacactggaatcggagatcaagtccagtgcttctgctgcggtggaaagctgaaaaactgggagccttgtgaccgggcctggtcagaacaccggcgccatttcccgaactgcttcttcgtcttgggccgcaacttgaatatcagatcggaaagcgacgccgtctcttccgaccgcaacttccccaattccaccaacctccctagaaacccgtccatggcggattacgaggcacgcatctttactttcggtacctggatttactcggttaacaaagagcaacttgcaagagctggattctacgcgctcggcgaaggagacaaagtgaagtgtttccactgcggtggtggtctgaccgactggaagccgtcggaagatccgtgggaacaacatgctaagtggtaccccggctgtaagtacctcctcgaacagaaaggccaagaatacatcaacaatatccatttgacccactcattggaagagtgtcttgtccgcacgactgaaaagaccccctcactcacgcggcgcatcgacgatactatcttccaaaacccaatggtccaggaagccattcgcatgggattctctttcaaagacattaagaagatcatggaggagaagatccaaatctctggatccaactacaagtcgctggaagtgctggtggcggacctggtcaacgctcagaaggattccatgcaagacgaatcctcgcagacctcacttcagaaggagatctcgacggaggagcagctgcgccgcttgcaggaggagaaattgtgcaagatttgcatggatagaaacatcgcaatcgtgttcgtcccttgcggacacctggtgacctgtaaacaatgcgcagaagctgttgacaagtgcccaatgtgctacactgtgatcaccttcaagcagaaaatcttcatgagc

SEQ ID NO: 33876 - DNA, 1491 bp, synthetic construct
  misc_feature 1..1491: note = Description of Artificial Sequence: Synthetic coding sequence
  source 1..1491: mol_type = other DNA
atgacttttaattcttttgaaggttcaaaaacttgtgttccagcagatattaataaagaagaagaatttgttgaagaattcaatagattaaaaactttcgctaactttccttctggaagtccagtatctgcttcaacattagctagagctggatttctttacactggagagggagataccgtaagatgtttttcatgtcacgctgctgtagatagatggcaatatggtgactcagcagttgggagacatcgaaaagtatcaccaaattgtagattcattaacggtttttaccttgaaaattctgcaactcaatctactaattcaggaatccaaaatggtcaatataaggtagaaaattacttgggaagtagagatcattttgctttagatagaccatcagaaacacatgctgattatttattaagaactggacaagttgttgatatttcagatactatttatcctagaaatccagctatgtattcagaagaagctagacttaagtcatttcaaaattggccagattatgcacatttaactccaagagaacttgcaagtgctggattgtattatactggaattggagatcaagttcaatgtttttgttgtggaggaaaattaaaaaattgggaaccatgtgatcgagcatggtcagaacatagaagacatttcccaaattgttttttcgtacttggaagaaatttaaatattagatctgaatcagatgcagtatcaagtgatcgtaatttcccaaacagtaccaatttacctagaaatccttcaatggctgactatgaggctagaatttttacatttggaacttggatatattctgttaataaagaacaacttgcaagggctggattttatgcattgggtgagggtgataaagttaagtgttttcattgtggtggagggttaactgactggaaaccaagtgaagatccatgggaacaacatgcaaaatggtatccaggatgcaaatatttattagagcaaaagggtcaagaatatattaataatattcatttaacacattcacttgaagaatgtttagttcgaactactgagaagacaccatcactaactagaagaattgatgatacgatttttcaaaatccaatggttcaagaagccattagaatgggatttagttttaaggatataaaaaagattatggaagaaaaaattcaaatttcaggatcaaattataaatcacttgaagttctagtagctgatttagtaaatgctcagaaagactcgatgcaagatgaatcaagtcaaactagtcttcaaaaagaaatttcaactgaagaacagctaaggagattacaagaagagaaactttgtaaaatttgtatggatagaaatatagcaatagtctttgttccatgtggacatttagttacttgtaaacaatgtgcagaagctgttgataaatgtcctatgtgttatacagttattacattcaagcaaaaaatttttatgtca

SEQ ID NO: 33877 - DNA, 1491 bp, synthetic construct
  misc_feature 1..1491: note = Description of Artificial Sequence: Synthetic coding sequence
  source 1..1491: mol_type = other DNA
atgacgttcaatagttttgaaggctccaaaacctgcgttccggcagatatcaacaaggaggaagagttcgtggaggagtttaatcgactcaaaactttcgcaaattttccctccgggagcccagtgtctgccagtaccctcgcccgagcaggattcctgtataccggagagggtgacaccgtgcgatgtttctcatgccatgcggcggtagacaggtggcagtatggtgacagcgctgtgggaaggcataggaaagtcagtcctaactgtaggtttattaatgggttttatttagagaactcagccacccaatctacaaatagcggaattcaaaatggacagtacaaagttgagaactaccttggcagtcgagaccactttgcacttgatcgccccagtgagactcacgcagattacctgctgagaactgggcaagtcgtggacatcagtgacaccatctaccctcgtaaccccgctatgtattccgaagaggctcgtttgaaatctttccagaactggcctgattacgcccatttaacaccgagagagcttgctagcgctggtctctactacacaggcattggagatcaggtacagtgtttctgctgtggtggcaaactgaagaactgggagccatgcgaccgagcctggagcgagcatcgtcgccacttccctaactgttttttcgtccttggtcgcaacctgaatatccggagcgaatcagacgccgtcagttcagacaggaatttccccaattccactaacttgcctagaaatccctcgatggcggattatgaagcaaggatctttaccttcggcacgtggatttattctgtcaataaagagcagctggccagagctgggttttacgccctgggcgagggagataaggtgaagtgctttcactgcgggggagggttaactgattggaaaccttcagaggatccatgggaacagcacgccaagtggtaccccggatgtaagtatttgctggaacaaaaggggcaagaatacattaataatatccacttgacccattcactcgaagagtgcctggttcgaacaaccgagaaaacacccagcttgactcggcgaatcgacgacaccatttttcagaaccctatggtgcaggaggccatacgaatgggctttagctttaaggacataaagaagattatggaggagaaaatccagatctcaggaagcaactacaagtcactggaggtattagtggccgacctcgttaacgcccagaaagattcaatgcaagacgaaagctcccagaccagtctgcagaaggaaatctctacggaggagcaactgcgaagactgcaggaagaaaagctctgtaagatatgtatggacaggaatatagctatagtattcgtaccatgcggtcacttagtgacttgcaagcagtgtgccgaagccgtcgacaaatgccccatgtgttacactgtgatcacttttaagcaaaaaatctttatgtcg

SEQ ID NO: 33878 - DNA, 1491 bp, synthetic construct
  misc_feature 1..1491: note = Description of Artificial Sequence: Synthetic coding sequence
  source 1..1491: mol_type = other DNA
atgactttcaactcctttgaagggtctaagacctgtgtgcctgccgacataaacaaggaagaagagtttgtggaagagttcaaccggcttaagacgtttgcgaattttccgtccggctcccctgtatccgcatccaccttggcgcgagccggatttctctacaccggggaaggcgacaccgtgaggtgcttctcctgccatgctgcagtcgaccggtggcagtacggggatagcgcggtggggcggcacagaaaggtgagcccaaattgtagattcatcaacggcttctacctcgagaattcggctactcagtccacgaactcgggcattcagaacgggcaatacaaggtcgagaactatctcgggtcgcgagatcatttcgcgctcgaccgcccgtctgagactcacgctgattacctgcttcggactggccaggtggttgacatctcagacaccatttacccacggaatccggccatgtactcggaggaagccagactcaaatccttccaaaactggccagactacgctcacctgacgccgcgggaactggcctcggccgggctgtactataccggaatcggagatcaggtccaatgcttctgctgtggcgggaaactgaagaactgggaaccatgcgaccgcgcctggagcgaacataggaggcatttccccaactgcttcttcgtccttggacgcaatttgaatatcagatcggagtcagacgctgtgtcgtcggacaggaacttcccaaacagcaccaacctgccccgcaaccccagcatggccgactacgaagcgcgcattttcactttcggaacttggatctactccgtgaataaggaacagttggccagagcaggcttctacgctctcggcgagggggataaggtcaagtgctttcactgcggaggaggactgaccgattggaagccatccgaagatccgtgggaacaacacgccaagtggtacccaggttgtaagtatctgttggagcagaaaggtcaggaatacatcaacaacatccatctgacgcactcgctcgaggaatgtctggtccgcaccactgagaaaactcccagcctgactcggcggatcgatgacactattttccagaatccgatggtgcaggaggccattagaatgggatttagcttcaaagacatcaagaagataatggaggaaaagatccagatctccggttccaactacaaatcactcgaagtgctcgtggccgacttggttaatgcccaaaaggattccatgcaagacgagtcaagccagacctctctccagaaagagatctccaccgaggaacaacttcgccggctgcaggaagagaagctgtgcaagatctgtatggatcgtaatatcgctatcgtctttgtgccgtgcgggcacctggtgacttgtaagcaatgtgcagaagcagtggacaaatgccctatgtgctacaccgtgatcactttcaaacagaagatattcatgagc

SEQ ID NO: 33879 - DNA, 1491 bp, synthetic construct
  misc_feature 1..1491: note = Description of Artificial Sequence: Synthetic coding sequence
  source 1..1491: mol_type = other DNA
atgacgtttaattcgtttgaaggttcgaaaacgtgtgttccggcggatataaataaagaagaagaatttgttgaagaatttaatcgtttaaaaacgtttgcgaattttccgtcgggttcgccggtatcggcgtcgacgttagcgcgtgcgggttttttatatacgggtgaaggtgatacggttcgttgtttttcgtgtcatgcggcggtagatcgatggcaatatggtgattcggcggttggtcgacatcgtaaagtatcgccgaattgtcgatttataaatggtttttatttagaaaattcggcgacgcaatcgacgaattcgggtatacaaaatggtcaatataaagtagaaaattatctaggttcgcgtgatcattttgcgttagatcgtccgtcggaaacgcatgcggattatttattacgaacgggtcaagttgtagatatatcggatacgatatatccgcgaaatccggcgatgtattcggaagaagcgcgattaaaatcgtttcaaaattggccggattatgcgcatctaacgccgcgtgaactagcgtcggcgggtttatattatacgggtataggtgatcaagtacaatgtttttgttgtggtggtaaactaaaaaattgggaaccgtgtgatcgagcgtggtcggaacatcgtcgtcattttccgaattgtttttttgttttaggtcgtaatttaaatatacgttcggaatcggatgcggtttcgtcggatcgaaattttccgaattcgacgaatttaccgcgaaatccgtcgatggcggattatgaagcgcgaatatttacgtttggtacgtggatatattcggtaaataaagaacaattagcgcgtgcgggtttttatgcgttaggtgaaggtgataaagtaaaatgttttcattgtggtggtggtttaacggattggaaaccgtcggaagatccgtgggaacaacatgcgaaatggtatccgggttgtaaatatctattagaacaaaaaggtcaagaatatataaataatatacatttaacgcattcgttagaagaatgtctagttcgtacgacggaaaaaacgccgtcgctaacgcgtcgaatagatgatacgatatttcaaaatccgatggttcaagaagcgatacgtatgggtttttcgtttaaagatataaaaaaaataatggaagaaaaaatacaaatatcgggttcgaattataaatcgctagaagtattagttgcggatctagttaatgcgcaaaaagattcgatgcaagatgaatcgtcgcaaacgtcgctacaaaaagaaatatcgacggaagaacaactacgtcgtttacaagaagaaaaattatgtaaaatatgtatggatcgaaatatagcgatagtatttgtaccgtgtggtcatttagtaacgtgtaaacaatgtgcggaagcggtagataaatgtccgatgtgttatacggtaataacgtttaaacaaaaaatatttatgtcg

SEQ ID NO: 33880 - DNA, 1491 bp, synthetic construct
  misc_feature 1..1491: note = Description of Artificial Sequence: Synthetic coding sequence
  source 1..1491: mol_type = other DNA
atgaccttcaactcctttgagggttcaaagacctgcgtgcctgcggacatcaacaaagaagaggaattcgtggaggagttcaataggctgaaaaccttcgccaactttccgtctggatcaccggtgtcggctagcactctggcgcgggcaggattcctgtacaccggagagggggatactgtgcggtgcttctcgtgccacgcggcagtggatcgatggcaatacggagatagcgctgtcggccgccatcggaaggtgtcacccaactgcagattcatcaacggattctacctggaaaacagcgccacccaatccacgaattcggggatccaaaacggacagtacaaggtcgaaaactacctcgggtcccgggatcattttgcgctggatagaccgtcggaaacccatgccgactacctgctgaggactggacaggtcgtcgacatctcggacactatttacccgcgcaatccggccatgtactcagaggaagcccgcctcaagagctttcagaattggccagattacgcccacctcactccacgggagctcgcctcggccggactctactacaccggaattggcgaccaggtccagtgtttctgttgcggtggaaagctcaagaattgggaaccttgcgaccgcgcctggagcgaacaccggcgccatttcccgaactgtttcttcgtgctcggccggaacctgaacatccgcagcgaatcggatgccgtatcttcagaccgcaattttccgaactccactaacctgccgcgcaacccatcgatggccgattacgaagctaggatcttcaccttcgggacgtggatatactccgttaacaaagagcagctcgcaagggccggtttttacgcacttggagagggagacaaggtgaagtgtttccactgcggaggaggactgaccgactggaagccttcagaggacccgtgggagcagcacgctaagtggtacccgggatgcaagtacctccttgaacaaaagggacaagaatacatcaataacatacatctcactcactctctggaggaatgtttggtgcggactactgaaaagactccgtcgttgactcgcaggattgacgatactatctttcaaaacccgatggtgcaggaggctatccgcatgggattctccttcaaagatatcaaaaagatcatggaggagaagatccaaatcagcgggagcaattacaaatctctggaggtgctggtggccgacctggtgaacgcgcagaaagattcgatgcaggacgaatccagccagacttccttgcagaaagagatctccactgaagaacaactccggcgcctccaggaagaaaagctgtgtaagatctgcatggatcgcaacatcgctatcgtgtttgtgccttgcggacacctggtcacttgcaagcagtgcgcggaagctgtggacaagtgccccatgtgctacactgtcatcactttcaagcagaagatcttcatgtcg

SEQ ID NO: 33881 - DNA, 1491 bp, synthetic construct
  misc_feature 1..1491: note = Description of Artificial Sequence: Synthetic coding sequence
  source 1..1491: mol_type = other DNA
atgacattcaactcgttcgagggaagtaagacctgtgtacccgccgacattaataaggaggaggaatttgtggaggagttcaacagattaaaaacctttgcaaacttccctagcggtagccctgtgtccgccagcaccctcgcgagggcaggtttcctctacactggtgagggggacacggtgcggtgcttttcttgtcacgcagccgtggatagatggcagtatggcgactcagccgttggccgacacagaaaagttagtcctaactgccggttcatcaacggcttctacctggagaatagtgccacccagtccacaaactccgggatccagaatggacaatacaaagtcgaaaactaccttggctcccgggaccacttcgccctggatagaccatccgagacccatgctgactatctcctgagaactggtcaagtcgttgacatctcggacacaatatatccccggaatcctgccatgtatagcgaagaggctcgactgaagagctttcagaactggcccgactacgcacacctcacgcctcgggaattagcctcagcgggactgtactatactggaatcggagatcaggttcagtgtttttgttgtggcggtaaattaaagaattgggagccatgtgatcgggcctggtcagagcaccgccgacattttcccaactgcttcttcgtcctgggacggaatctcaacattaggagcgagtcagacgccgtgagtagcgatcggaactttccgaatagcaccaatctgccccgcaacccttctatggccgactacgaggcccgaatctttacattcgggacctggatttacagcgtaaacaaagagcaattggcgagggccggattttacgcgctgggtgagggtgataaggtaaaatgcttccattgtggaggcgggcttactgattggaagcctagcgaggatccctgggagcagcacgcaaagtggtatccgggttgtaagtatctgctcgaacagaagggccaggagtacataaacaacatccatctcactcatagtctggaagagtgccttgtcagaacgaccgagaagaccccttcattgacccgtaggatcgatgacactatctttcagaatccaatggtgcaggaggccattcgaatggggttctccttcaaggatatcaagaagatcatggaagaaaaaatacagatatcgggaagcaattacaagtcattggaggtgctagtcgccgatcttgtgaacgcccagaaagactccatgcaggatgagtctagtcagacatccctacagaaagagatcagtactgaagagcagcttagaaggctgcaggaagaaaagctgtgtaaaatctgcatggacagaaacatcgctatagtattcgtcccttgtgggcacttggtcacatgcaagcagtgcgctgaagccgtggacaagtgccctatgtgctatacagtaataaccttcaagcagaaaatttttatgtcc

SEQ ID NO: 33882 - DNA, 1491 bp, synthetic construct
  misc_feature 1..1491: note = Description of Artificial Sequence: Synthetic coding sequence
  source 1..1491: mol_type = other DNA
atgacctttaactcgttcgaagggtcaaagacctgcgtccccgccgatatcaacaaggaagaagagttcgtggaagagtttaaccggttgaaaactttcgcgaactttccgtccgggtcgccagtctccgcctccactctggcccgggccggcttcctctacaccggggaaggagatacggtgagatgcttctcatgccatgcagccgtggacagatggcaatatggagactcagcggtgggccggcacagaaaggtgtcacctaactgccgctttatcaacgggttttaccttgaaaactcggcgactcagtccactaattcgggaatccaaaatggccagtataaggtggagaattacctcggatcccgggaccatttcgcgctggacagaccgtccgagactcacgcagactatctgctccggactggacaggtggttgacatcagcgacactatctacccgcgcaatccagccatgtactcagaagaagctaggctcaagtcatttcaaaactggcctgattacgctcacctgactcccagggagctggcctcagccggcctgtactacaccggcattggcgatcaggtgcaatgcttttgttgcggaggaaagctcaagaactgggaaccatgcgacagagcctggtcagaacatagacgccatttcccgaattgcttcttcgtcctgggacgcaatttgaacatcagatccgagtccgatgctgtgagctcggaccggaacttccctaatagcacgaatctgcccagaaacccatcgatggcggattacgaagcgaggatcttcactttcgggacttggatctactcggtgaacaaggaacagctcgcccgggcagggttctacgcattgggcgaaggtgacaaggtgaaatgcttccactgcggcggaggccttactgactggaaaccgtccgaggacccttgggagcaacatgccaagtggtacccaggatgtaagtatttgctggagcagaagggacaggaatacatcaacaatatccatctgacccactctctggaggaatgcctggtgcgaacgaccgaaaagaccccgtcgctgacccgccggatcgatgataccatctttcaaaatccgatggtccaggaagcgattcgcatgggcttctcgttcaaggacatcaagaagataatggaggagaagatccaaatctcaggctccaattacaaatcgctggaagtgctcgtggctgatcttgtgaatgcccaaaaggactcaatgcaagacgagagctcgcaaacttcactgcaaaaggagatctcgaccgaagagcagctgagacgcctgcaagaggagaagctctgcaaaatctgcatggaccgcaatatcgctatcgtgtttgtgccttgcggacacctggtgacctgcaaacagtgcgctgaagccgtcgacaagtgcccgatgtgctacaccgtcatcactttcaagcaaaagatcttcatgtcg

SEQ ID NO: 33883-33886 - skipped (4 entries)

SEQ ID NO: 33887 - protein, 6 aa, Homo sapiens
LVPRGS

SEQ ID NO: 33888 - protein, 4 aa, Homo sapiens
LVPR

SEQ ID NO: 33889 - skipped

SEQ ID NO: 33890 - protein, 4 aa, Homo sapiens
IEGR

SEQ ID NO: 33891 - protein, 4 aa, Homo sapiens
IDGR

SEQ ID NO: 33892 - protein, 4 aa, Homo sapiens
AEGR

SEQ ID NO: 33893 - skipped

SEQ ID NO: 33894 - DNA, 615 bp, synthetic construct
  source 1..615: mol_type = other DNA
atggctggacctgccacccagagccccatgaagctgatggccctgcagctgctgctgtggcacagtgcactctggacagtgcaggaagccacccccctgggccctgccagctccctgccccagagcttcctgctcaagtgcttagagcaagtgaggaagatccagggcgatggcgcagcgctccaggagaagctgtgtgccacctacaagctgtgccaccccgaggagctggtgctgctcggacactctctgggcatcccctgggctcccctgagcagctgccccagccaggccctgcagctggcaggctgcttgagccaactccatagcggccttttcctctaccaggggctcctgcaggccctggaagggatctcccccgagttgggtcccaccttggacacactgcagctggacgtcgccgactttgccaccaccatctggcagcagatggaagaactgggaatggcccctgccctgcagcccacccagggtgccatgccggccttcgcctctgctttccagcgccgggcaggaggggtcctggttgcctcccatctgcagagcttcctggaggtgtcgtaccgcgttctacgccaccttgcccagccctga

SEQ ID NO: 33895 - DNA, 800 bp, synthetic construct
  misc_feature 1..800: note = Description of Artificial Sequence: Synthetic transcript sequence
  source 1..800: mol_type = other DNA
taatacgactcactatagggaaataagagagaaaagaagagtaagaagaaatataagagccaccatggctggacctgccacccagagccccatgaagctgatggccctgcagctgctgctgtggcacagtgcactctggacagtgcaggaagccacccccctgggccctgccagctccctgccccagagcttcctgctcaagtgcttagagcaagtgaggaagatccagggcgatggcgcagcgctccaggagaagctgtgtgccacctacaagctgtgccaccccgaggagctggtgctgctcggacactctctgggcatcccctgggctcccctgagcagctgccccagccaggccctgcagctggcaggctgcttgagccaactccatagcggccttttcctctaccaggggctcctgcaggccctggaagggatctcccccgagttgggtcccaccttggacacactgcagctggacgtcgccgactttgccaccaccatctggcagcagatggaagaactgggaatggcccctgccctgcagcccacccagggtgccatgccggccttcgcctctgctttccagcgccgggcaggaggggtcctggttgcctcccatctgcagagcttcctggaggtgtcgtaccgcgttctacgccaccttgcccagccctgaagcgctgccttctgcggggcttgccttctggccatgcccttcttctctcccttgcacctgtacctcttggtctttgaataaagcctgagtaggaaggcggccgctcgagcatgcatctaga

SEQ ID NO: 33896 - DNA, 800 bp, synthetic construct
  misc_feature 1..800: note = Description of Artificial Sequence: Synthetic transcript sequence
  source 1..800: mol_type = other DNA
taatacgactcactatagggaaataagagagaaaagaagagtaagaagaaatataagagccaccatggccggtcccgcgacccaaagccccatgaaacttatggccctgcagttgctgctttggcactcggccctctggacagtccaagaagcgactcctctcggacctgcctcatcgttgccgcagtcattccttttgaagtgtctggagcaggtgcgaaagattcagggcgatggagccgcactccaagagaagctctgcgcgacatacaaactttgccatcccgaggagctcgtactgctcgggcacagcttggggattccctgggctcctctctcgtcctgtccgtcgcaggctttgcagttggcagggtgcctttcccagctccactccggtttgttcttgtatcagggactgctgcaagcccttgagggaatctcgccagaattgggcccgacgctggacacgttgcagctcgacgtggcggatttcgcaacaaccatctggcagcagatggaggaactggggatggcacccgcgctgcagcccacgcagggggcaatgccggcctttgcgtccgcgtttcagcgcagggcgggtggagtcctcgtagcgagccaccttcaatcatttttggaagtctcgtaccgggtgctgagacatcttgcgcagccgtgaagcgctgccttctgcggggcttgccttctggccatgcccttcttctctcccttgcacctgtacctcttggtctttgaataaagcctgagtaggaaggcggccgctcgagcatgcatctaga

SEQ ID NO: 33897 - RNA, 758 nt, synthetic construct
  misc_feature 1..758: note = Description of Artificial Sequence: Synthetic transcript sequence
  source 1..758: mol_type = other RNA
gggaaataagagagaaaagaagagtaagaagaaatataagagccaccatggccggtcccgcgacccaaagccccatgaaacttatggccctgcagttgctgctttggcactcggccctctggacagtccaagaagcgactcctctcggacctgcctcatcgttgccgcagtcattccttttgaagtgtctggagcaggtgcgaaagattcagggcgatggagccgcactccaagagaagctctgcgcgacatacaaactttgccatcccgaggagctcgtactgctcgggcacagcttggggattccctgggctcctctctcgtcctgtccgtcgcaggctttgcagttggcagggtgcctttcccagctccactccggtttgttcttgtatcagggactgctgcaagcccttgagggaatctcgccagaattgggcccgacgctggacacgttgcagctcgacgtggcggatttcgcaacaaccatctggcagcagatggaggaactggggatggcacccgcgctgcagcccacgcagggggcaatgccggcctttgcgtccgcgtttcagcgcagggcgggtggagtcctcgtagcgagccaccttcaatcatttttggaagtctcgtaccgggtgctgagacatcttgcgcagccgtgaagcgctgccttctgcggggcttgccttctggccatgcccttcttctctcccttgcacctgtacctcttggtctttgaataaagcctgagtaggaag

SEQ ID NO: 33898 - RNA, 854 nt, synthetic construct
  misc_feature 1..854: note = Description of Artificial Sequence: Synthetic transcript sequence
  source 1..854: mol_type = other RNA
gggaaataagagagaaaagaagagtaagaagaaatataagagccaccatggtatccaagggggaggaggacaacatggcgatcatcaaggagttcatgcgattcaaggtgcacatggaaggttcggtcaacggacacgaatttgaaatcgaaggagagggtgaaggaaggccctatgaagggacacagaccgcgaaactcaaggtcacgaaagggggaccacttcctttcgcctgggacattctttcgccccagtttatgtacgggtccaaagcatatgtgaagcatcccgccgatattcctgactatctgaaactcagctttcccgagggattcaagtgggagcgggtcatgaactttgaggacgggggtgtagtcaccgtaacccaagactcaagcctccaagacggcgagttcatctacaaggtcaaactgcgggggactaactttccgtcggatgggccggtgatgcagaagaaaacgatgggatgggaagcgtcatcggagaggatgtacccagaagatggtgcattgaagggggagatcaagcagagactgaagttgaaagatgggggacattatgatgccgaggtgaaaacgacatacaaagcgaaaaagccggtgcagcttcccggagcgtataatgtgaatatcaagttggatattacttcacacaatgaggactacacaattgtcgaacagtacgaacgcgctgagggtagacactcgacgggaggcatggacgagttgtacaaatgataagctgccttctgcggggcttgccttctggccatgcccttcttctctcccttgcacctgtacctcttggtctttgaataaagcctgagtaggaag

SEQ ID NO: 33899 - DNA, 896 bp, synthetic construct
  misc_feature 1..896: note = Description of Artificial Sequence: Synthetic transcript sequence
  source 1..896: mol_type = other DNA
taatacgactcactatagggaaataagagagaaaagaagagtaagaagaaatataagagccaccatggtatccaagggggaggaggacaacatggcgatcatcaaggagttcatgcgattcaaggtgcacatggaaggttcggtcaacggacacgaatttgaaatcgaaggagagggtgaaggaaggccctatgaagggacacagaccgcgaaactcaaggtcacgaaagggggaccacttcctttcgcctgggacattctttcgccccagtttatgtacgggtccaaagcatatgtgaagcatcccgccgatattcctgactatctgaaactcagctttcccgagggattcaagtgggagcgggtcatgaactttgaggacgggggtgtagtcaccgtaacccaagactcaagcctccaagacggcgagttcatctacaaggtcaaactgcgggggactaactttccgtcggatgggccggtgatgcagaagaaaacgatgggatgggaagcgtcatcggagaggatgtacccagaagatggtgcattgaagggggagatcaagcagagactgaagttgaaagatgggggacattatgatgccgaggtgaaaacgacatacaaagcgaaaaagccggtgcagcttcccggagcgtataatgtgaatatcaagttggatattacttcacacaatgaggactacacaattgtcgaacagtacgaacgcgctgagggtagacactcgacgggaggcatggacgagttgtacaaatgataagctgccttctgcggggcttgccttctggccatgcccttcttctctcccttgcacctgtacctcttggtctttgaataaagcctgagtaggaaggcggccgctcgagcatgcatctaga

SEQ ID NO: 33900 - RNA, 725 nt, synthetic construct
  misc_feature 1..725: note = Description of Artificial Sequence: Synthetic transcript sequence
  source 1..725: mol_type = other RNA
gggaaataagagagaaaagaagagtaagaagaaatataagagccaccatgggagtgcacgagtgtcccgcgtggttgtggttgctgctgtcgctcttgagcctcccactgggactgcctgtgctgggggcaccacccagattgatctgcgactcacgggtacttgagaggtaccttcttgaagccaaagaagccgaaaacatcacaaccggatgcgccgagcactgctccctcaatgagaacattactgtaccggatacaaaggtcaatttctatgcatggaagagaatggaagtaggacagcaggccgtcgaagtgtggcaggggctcgcgcttttgtcggaggcggtgttgcggggtcaggccctcctcgtcaactcatcacagccgtgggagcccctccaacttcatgtcgataaagcggtgtcggggctccgcagcttgacgacgttgcttcgggctctgggcgcacaaaaggaggctatttcgccgcctgacgcggcctccgcggcacccctccgaacgatcaccgcggacacgtttaggaagctttttagagtgtacagcaatttcctccgcggaaagctgaaattgtatactggtgaagcgtgtaggacaggggatcgctgataagctgccttctgcggggcttgccttctggccatgcccttcttctctcccttgcacctgtacctcttggtctttgaataaagcctgagtaggaag

SEQ ID NO: 33901 - RNA, 1536 nt, synthetic construct
  misc_feature 1..1536: note = Description of Artificial Sequence: Synthetic transcript sequence
  source 1..1536: mol_type = other RNA
gggaaataagagagaaaagaagagtaagaagaaatataagagccaccaatgcagcgcgtcaacatgattatggccgaatcgccgggactcatcacaatctgcctcttgggttatctcttgtcggcagaatgtaccgtgttcttggatcacgaaaacgcgaacaaaattcttaatcgcccgaagcggtataactccgggaaacttgaggagtttgtgcagggcaatcttgaacgagagtgcatggaggagaaatgctcctttgaggaggcgagggaagtgtttgaaaacacagagcgaacaacggagttttggaagcaatacgtagatggggaccagtgtgagtcgaatccgtgcctcaatgggggatcatgtaaagatgacatcaatagctatgaatgctggtgcccgtttgggtttgaagggaagaactgtgagctggatgtgacgtgcaacatcaaaaacggacgctgtgagcagttttgtaagaactcggctgacaataaggtagtatgctcgtgcacagagggataccggctggcggagaaccaaaaatcgtgcgagcccgcagtcccgttcccttgtgggagggtgagcgtgtcacagactagcaagttgacgagagcggagactgtattccccgacgtggactacgtcaacagcaccgaagccgaaacaatcctcgataacatcacgcagagcactcagtccttcaatgactttacgagggtcgtaggtggtgaggacgcgaaacccggtcagttcccctggcaggtggtattgaacggaaaagtcgatgccttttgtggaggttccattgtcaacgagaagtggattgtcacagcggcacactgcgtagaaacaggagtgaaaatcacggtagtggcgggagagcataacattgaagagacagagcacacggaacaaaagcgaaatgtcatcagaatcattccacaccataactataacgcggcaatcaataagtacaatcacgacatcgcacttttggagcttgacgaacctttggtgcttaattcgtacgtcacccctatttgtattgccgacaaagagtatacaaacatcttcttgaaattcggctccgggtacgtatcgggctggggcagagtgttccataagggtagatccgcactggtgttgcaatacctcagggtgcccctcgtggatcgagccacttgtctgcggtccaccaaattcacaatctacaacaatatgttctgtgcgggattccatgaaggtgggagagatagctgccagggagactcagggggtccccacgtgacggaagtcgaggggacgtcatttctgacgggaattatctcatggggagaggaatgtgcgatgaaggggaaatatggcatctacactaaagtgtcacggtatgtcaattggatcaaggaaaagacgaaactcacgtgatcagccagcgctgccttctgcggggcttgccttctggccatgcccttcttctctcccttgcacctgtacctcttggtctttgaataaagcctgagtaggaag

SEQ ID NO: 33902 - DNA, 767 bp, synthetic construct
  misc_feature 1..767: note = Description of Artificial Sequence: Synthetic transcript sequence
  source 1..767: mol_type = other DNA
taatacgactcactatagggaaataagagagaaaagaagagtaagaagaaatataagagccaccatgggagtgcacgagtgtcccgcgtggttgtggttgctgctgtcgctcttgagcctcccactgggactgcctgtgctgggggcaccacccagattgatctgcgactcacgggtacttgagaggtaccttcttgaagccaaagaagccgaaaacatcacaaccggatgcgccgagcactgctccctcaatgagaacattactgtaccggatacaaaggtcaatttctatgcatggaagagaatggaagtaggacagcaggccgtcgaagtgtggcaggggctcgcgcttttgtcggaggcggtgttgcggggtcaggccctcctcgtcaactcatcacagccgtgggagcccctccaacttcatgtcgataaagcggtgtcggggctccgcagcttgacgacgttgcttcgggctctgggcgcacaaaaggaggctatttcgccgcctgacgcggcctccgcggcacccctccgaacgatcaccgcggacacgtttaggaagctttttagagtgtacagcaatttcctccgcggaaagctgaaattgtatactggtgaagcgtgtaggacaggggatcgctgataagctgccttctgcggggcttgccttctggccatgcccttcttctctcccttgcacctgtacctcttggtctttgaataaagcctgagtaggaaggcggccgctcgagcatgcatctaga

SEQ ID NO: 33903 - DNA, 750 bp, synthetic construct
  misc_feature 1..750: note = Description of Artificial Sequence: Synthetic transcript sequence
  source 1..750: mol_type = other DNA
taatacgactcactatagggaaataagagagaaaagaagagtaagaagaaatataagagccaccatgggagtgcacgagtgtcccgcgtggttgtggttgctgctgtcgctcttgagcctcccactgggactgcctgtgctgggggcaccacccagattgatctgcgactcacgggtacttgagaggtaccttcttgaagccaaagaagccgaaaacatcacaaccggatgcgccgagcactgctccctcaatgagaacattactgtaccggatacaaaggtcaatttctatgcatggaagagaatggaagtaggacagcaggccgtcgaagtgtggcaggggctcgcgcttttgtcggaggcggtgttgcggggtcaggccctcctcgtcaactcatcacagccgtgggagcccctccaacttcatgtcgataaagcggtgtcggggctccgcagcttgacgacgttgcttcgggctctgggcgcacaaaaggaggctatttcgccgcctgacgcggcctccgcggcacccctccgaacgatcaccgcggacacgtttaggaagctttttagagtgtacagcaatttcctccgcggaaagctgaaattgtatactggtgaagcgtgtaggacaggggatcgctgataagctgccttctgcggggcttgccttctggccatgcccttcttctctcccttgcacctgtacctcttggtctttgaataaagcctgagtaggaaggcggccgc

SEQ ID NO: 33904 - DNA, 1578 bp, synthetic construct
  misc_feature 1..1578: note = Description of Artificial Sequence: Synthetic transcript sequence
  source 1..1578: mol_type = other DNA
taatacgactcactatagggaaataagagagaaaagaagagtaagaagaaatataagagccaccaatgcagcgcgtcaacatgattatggccgaatcgccgggactcatcacaatctgcctcttgggttatctcttgtcggcagaatgtaccgtgttcttggatcacgaaaacgcgaacaaaattcttaatcgcccgaagcggtataactccgggaaacttgaggagtttgtgcagggcaatcttgaacgagagtgcatggaggagaaatgctcctttgaggaggcgagggaagtgtttgaaaacacagagcgaacaacggagttttggaagcaatacgtagatggggaccagtgtgagtcgaatccgtgcctcaatgggggatcatgtaaagatgacatcaatagctatgaatgctggtgcccgtttgggtttgaagggaagaactgtgagctggatgtgacgtgcaacatcaaaaacggacgctgtgagcagttttgtaagaactcggctgacaataaggtagtatgctcgtgcacagagggataccggctggcggagaaccaaaaatcgtgcgagcccgcagtcccgttcccttgtgggagggtgagcgtgtcacagactagcaagttgacgagagcggagactgtattccccgacgtggactacgtcaacagcaccgaagccgaaacaatcctcgataacatcacgcagagcactcagtccttcaatgactttacgagggtcgtaggtggtgaggacgcgaaacccggtcagttcccctggcaggtggtattgaacggaaaagtcgatgccttttgtggaggttccattgtcaacgagaagtggattgtcacagcggcacactgcgtagaaacaggagtgaaaatcacggtagtggcgggagagcataacattgaagagacagagcacacggaacaaaagcgaaatgtcatcagaatcattccacaccataactataacgcggcaatcaataagtacaatcacgacatcgcacttttggagcttgacgaacctttggtgcttaattcgtacgtcacccctatttgtattgccgacaaagagtatacaaacatcttcttgaaattcggctccgggtacgtatcgggctggggcagagtgttccataagggtagatccgcactggtgttgcaatacctcagggtgcccctcgtggatcgagccacttgtctgcggtccaccaaattcacaatctacaacaatatgttctgtgcgggattccatgaaggtgggagagatagctgccagggagactcagggggtccccacgtgacggaagtcgaggggacgtcatttctgacgggaattatctcatggggagaggaatgtgcgatgaaggggaaatatggcatctacactaaagtgtcacggtatgtcaattggatcaaggaaaagacgaaactcacgtgatcagccagcgctgccttctgcggggcttgccttctggccatgcccttcttctctcccttgcacctgtacctcttggtctttgaataaagcctgagtaggaaggcggccgctcgagcatgcatctaga

SEQ ID NO: 33905 - RNA, 851 nt, synthetic construct
  misc_feature 1..851: note = Description of Artificial Sequence: Synthetic transcript sequence
  source 1..851: mol_type = other RNA
gggaaataagagagaaaagaagagtaagaagaaatataagagccaccatggtgagcaagggcgaggaggataacatggccatcatcaaggagttcatgcgcttcaaggtgcacatggagggctccgtgaacggccacgagttcgagatcgagggcgagggcgagggccgcccctacgagggcacccagaccgccaagctgaaggtgaccaagggtggccccctgcccttcgcctgggacatcctgtcccctcagttcatgtacggctccaaggcctacgtgaagcaccccgccgacatccccgactacttgaagctgtccttccccgagggcttcaagtgggagcgcgtgatgaacttcgaggacggcggcgtggtgaccgtgacccaggactcctccctgcaggacggcgagttcatctacaaggtgaagctgcgcggcaccaacttcccctccgacggccccgtaatgcagaagaagaccatgggctgggaggcctcctccgagcggatgtaccccgaggacggcgccctgaagggcgagatcaagcagaggctgaagctgaaggacggcggccactacgacgctgaggtcaagaccacctacaaggccaagaagcccgtgcagctgcccggcgcctacaacgtcaacatcaagttggacatcacctcccacaacgaggactacaccatcgtggaacagtacgaacgcgccgagggccgccactccaccggcggcatggacgagctgtacaagtgagctgccttctgcggggcttgccttctggccatgcccttcttctctcccttgcacctgtacctcttggtctttgaataaagcctgagtaggaag

SEQ ID NO: 33906 - DNA, 1838 bp, synthetic construct
  misc_feature 1..1838: note = Description of Artificial Sequence: Synthetic transcript sequence
  source 1..1838: mol_type = other DNA
taatacgactcactatagggaaataagagagaaaagaagagtaagaagaaatataagagccaccatggaagatgcgaagaacatcaagaagggacctgccccgttttaccctttggaggacggtacagcaggagaacagctccacaaggcgatgaaacgctacgccctggtccccggaacgattgcgtttaccgatgcacatattgaggtagacatcacatacgcagaatacttcgaaatgtcggtgaggctggcggaagcgatgaagagatatggtcttaacactaatcaccgcatcgtggtgtgttcggagaactcattgcagtttttcatgccggtccttggagcacttttcatcggggtcgcagtcgcgccagcgaacgacatctacaatgagcgggaactcttgaatagcatgggaatctcccagccgacggtcgtgtttgtctccaaaaaggggctgcagaaaatcctcaacgtgcagaagaagctccccattattcaaaagatcatcattatggatagcaagacagattaccaagggttccagtcgatgtatacctttgtgacatcgcatttgccgccagggtttaacgagtatgacttcgtccccgagtcatttgacagagataaaaccatcgcgctgattatgaattcctcgggtagcaccggtttgccaaagggggtggcgttgccccaccgcactgcttgtgtgcggttctcgcacgctagggatcctatctttggtaatcagatcattcccgacacagcaatcctgtccgtggtaccttttcatcacggttttggcatgttcacgactctcggctatttgatttgcggtttcagggtcgtacttatgtatcggttcgaggaagaactgtttttgagatccttgcaagattacaagatccagtcggccctccttgtgccaacgcttttctcattctttgcgaaatcgacacttattgataagtatgacctttccaatctgcatgagattgcctcagggggagcgccgcttagcaaggaagtcggggaggcagtggccaagcgcttccaccttcccggaattcggcagggatacgggctcacggagacaacatccgcgatccttatcacgcccgagggtgacgataagccgggagccgtcggaaaagtggtccccttctttgaagccaaggtcgtagacctcgacacgggaaaaaccctcggagtgaaccagaggggcgagctctgcgtgagagggccgatgatcatgtcaggttacgtgaataaccctgaagcgacgaatgcgctgatcgacaaggatgggtggttgcattcgggagacattgcctattgggatgaggatgagcacttctttatcgtagatcgacttaagagcttgatcaaatacaaaggctatcaggtagcgcctgccgagctcgagtcaatcctgctccagcaccccaacattttcgacgccggagtggccgggttgcccgatgacgacgcgggtgagctgccagcggccgtggtagtcctcgaacatgggaaaacaatgaccgaaaaggagatcgtggactacgtagcatcacaagtgacgactgcgaagaaactgaggggaggggtagtctttgtggacgaggtcccgaaaggcttgactgggaagcttgacgctcgcaaaatccgggaaatcctgattaaggcaaagaaaggcgggaaaatcgctgtctgataagctgccttctgcggggcttgccttctggccatgcccttcttctctcccttgcacctgtacctcttggtctttgaataaagcctgagtaggaaggcggccgctcgagcatgcatctaga

SEQ ID NO: 33907 - RNA, 1796 nt, synthetic construct
  misc_feature 1..1796: note = Description of Artificial Sequence: Synthetic transcript sequence
  source 1..1796: mol_type = other RNA
gggaaataagagagaaaagaagagtaagaagaaatataagagccaccatggaagatgcgaagaacatcaagaagggacctgccccgttttaccctttggaggacggtacagcaggagaacagctccacaaggcgatgaaacgctacgccctggtccccggaacgattgcgtttaccgatgcacatattgaggtagacatcacatacgcagaatacttcgaaatgtcggtgaggctggcggaagcgatgaagagatatggtcttaacactaatcaccgcatcgtggtgtgttcggagaactcattgcagtttttcatgccggtccttggagcacttttcatcggggtcgcagtcgcgccagcgaacgacatctacaatgagcgggaactcttgaatagcatgggaatctcccagccgacggtcgtgtttgtctccaaaaaggggctgcagaaaatcctcaacgtgcagaagaagctccccattattcaaaagatcatcattatggatagcaagacagattaccaagggttccagtcgatgtatacctttgtgacatcgcatttgccgccagggtttaacgagtatgacttcgtccccgagtcatttgacagagataaaaccatcgcgctgattatgaattcctcgggtagcaccggtttgccaaagggggtggcgttgccccaccgcactgcttgtgtgcggttctcgcacgctagggatcctatctttggtaatcagatcattcccgacacagcaatcctgtccgtggtaccttttcatcacggttttggcatgttcacgactctcggctatttgatttgcggtttcagggtcgtacttatgtatcggttcgaggaagaactgtttttgagatccttgcaagattacaagatccagtcggccctccttgtgccaacgcttttctcattctttgcgaaatcgacacttattgataagtatgacctttccaatctgcatgagattgcctcagggggagcgccgcttagcaaggaagtcggggaggcagtggccaagcgcttccaccttcccggaattcggcagggatacgggctcacggagacaacatccgcgatccttatcacgcccgagggtgacgataagccgggagccgtcggaaaagtggtccccttctttgaagccaaggtcgtagacctcgacacgggaaaaaccctcggagtgaaccagaggggcgagctctgcgtgagagggccgatgatcatgtcaggttacgtgaataaccctgaagcgacgaatgcgctgatcgacaaggatgggtggttgcattcgggagacattgcctattgggatgaggatgagcacttctttatcgtagatcgacttaagagcttgatcaaatacaaaggctatcaggtagcgcctgccgagctcgagtcaatcctgctccagcaccccaacattttcgacgccggagtggccgggttgcccgatgacgacgcgggtgagctgccagcggccgtggtagtcctcgaacatgggaaaacaatgaccgaaaaggagatcgtggactacgtagcatcacaagtgacgactgcgaagaaactgaggggaggggtagtctttgtggacgaggtcccgaaaggcttgactgggaagcttgacgctcgcaaaatccgggaaatcctgattaaggcaaagaaaggcgggaaaatcgctgtctgataagctgccttctgcggggcttgccttctggccatgcccttcttctctcccttgcacctgtacctcttggtctttgaataaagcctgagtaggaag

SEQ ID NO: 33908 - DNA, 905 bp, synthetic construct
  misc_feature 1..905: note = Description of Artificial Sequence: Synthetic transcript sequence
  source 1..905: mol_type = other DNA
taatacgactcactatagggaaataagagagaaaagaagagtaagaagaaatataagagccaccatggtgtccaagggtgaggaattgtttaccggggtggtgcctattctcgtcgaacttgacggggatgtgaatggacacaagttttcggtatccggagaaggagagggtgacgccacatacggaaagcttacactcaaattcatctgtacgacggggaaactgcccgtaccctggcctacgctcgtaaccacgctgacttatggagtgcagtgctttagcagataccccgaccatatgaagcagcacgacttcttcaagtcggcgatgcccgaggggtacgtgcaagagaggaccattttcttcaaagacgatggcaattacaaaacacgcgcagaagtcaagtttgagggcgatactctggtcaatcggatcgaattgaagggaatcgatttcaaagaagatggaaacatccttggccataagctcgagtacaactataactcgcataatgtctatatcatggctgacaagcagaaaaacggtatcaaagtcaactttaagatccgacacaatattgaggacggttcggtgcagcttgcggaccactatcaacagaatacgccgattggggatggtccggtccttttgccggataaccattatctctcaacccagtcagccctgagcaaagatccaaacgagaagagggaccacatggtcttgctcgaattcgtgacagcggcagggatcactctgggaatggacgagttgtacaagtgataagctgccttctgcggggcttgccttctggccatgcccttcttctctcccttgcacctgtacctcttggtctttgaataaagcctgagtaggaaggcggccgctcgagcatgcatctaga

SEQ ID NO: 33909 - RNA, 863 nt, synthetic construct
  misc_feature 1..863: note = Description of Artificial Sequence: Synthetic transcript sequence
  source 1..863: mol_type = other RNA
gggaaataagagagaaaagaagagtaagaagaaatataagagccaccatggtgtccaagggtgaggaattgtttaccggggtggtgcctattctcgtcgaacttgacggggatgtgaatggacacaagttttcggtatccggagaaggagagggtgacgccacatacggaaagcttacactcaaattcatctgtacgacggggaaactgcccgtaccctggcctacgctcgtaaccacgctgacttatggagtgcagtgctttagcagataccccgaccatatgaagcagcacgacttcttcaagtcggcgatgcccgaggggtacgtgcaagagaggaccattttcttcaaagacgatggcaattacaaaacacgcgcagaagtcaagtttgagggcgatactctggtcaatcggatcgaattgaagggaatcgatttcaaagaagatggaaacatccttggccataagctcgagtacaactataactcgcataatgtctatatcatggctgacaagcagaaaaacggtatcaaagtcaactttaagatccgacacaatattgaggacggttcggtgcagcttgcggaccactatcaacagaatacgccgattggggatggtccggtccttttgccggataaccattatctctcaacccagtcagccctgagcaaagatccaaacgagaagagggaccacatggtcttgctcgaattcgtgacagcggcagggatcactctgggaatggacgagttgtacaagtgataagctgccttctgcggggcttgccttctggccatgcccttcttctctcccttgcacctgtacctcttggtctttgaataaagcctgagtaggaag

SEQ ID NO: 33910 - RNA, 716 nt, synthetic construct
  misc_feature 1..716: note = Description of Artificial Sequence: Synthetic transcript sequence
  source 1..716: mol_type = other RNA
gggaaataagagagaaaagaagagtaagaagaaatataagagccaccatgaactttctcttgtcatgggtgcactggagccttgcgctgctgctgtatcttcatcacgctaagtggagccaggccgcacccatggcggagggtggcggacagaatcaccacgaagtagtcaaattcatggacgtgtaccagaggtcgtattgccatccgattgaaactcttgtggatatctttcaagaataccccgatgaaatcgagtacattttcaaaccgtcgtgtgtccctctcatgaggtgcgggggatgctgcaatgatgaagggttggagtgtgtccccacggaggagtcgaatatcacaatgcaaatcatgcgcatcaaaccacatcagggtcagcatattggagagatgtcctttctccagcacaacaaatgtgagtgtagaccgaagaaggaccgagcccgacaggaaaacccatgcggaccgtgctccgagcggcgcaaacacttgttcgtacaagacccccagacatgcaagtgctcatgtaagaataccgattcgcggtgtaaggcgagacagctggaattgaacgagcgcacgtgtaggtgcgacaagcctagacggtgagctgccttctgcggggcttgccttctggccatgcccttcttctctcccttgcacctgtacctcttggtctttgaataaagcctgagtaggaag

SEQ ID NO: 33911 - RNA, 1316 nt, synthetic construct
  misc_feature 1..1316: note = Description of Artificial Sequence: Synthetic transcript sequence
  source 1..1316: mol_type = other RNA
gggaaataagagagaaaagaagagtaagaagaaatataagagccaccatgcccccatcgggattgagattgttgccccttctgcttccgctgctttggttgctcgtcctgacccctggcaggcccgcagcggggttgtcgacgtgtaagacgattgacatggagctcgtgaaacgcaagagaattgaagcaatcaggggtcaaattctgagcaaactcagactcgcatccccaccgtcccagggtgaggtcccaccgggacctctgcccgaggcggtcctggccttgtacaactcgacacgcgaccgagtcgcaggggagtcagcggaacccgagcccgaacccgaggccgactactacgccaaagaggtcactcgggtcttgatggtggaaactcacaacgaaatctacgacaagtttaagcagtcgacccattcgatctacatgttcttcaataccagcgagcttagagaagcggtccccgagccggtacttttgtccagagcggagctgcggttgctcaggctcaagctgaaagtggaacagcacgtagagctttatcagaagtacagcaacaattcatggcggtatctctcgaaccggctgttggcgccgtcggattcacccgaatggctcagctttgatgtcacgggggtggtgcgccagtggttgtccaggggcggagagatcgaaggatttcggctctcagcccactgttcgtgtgatagcagggacaacacgctccaagtagatatcaacggattcactactggtcgcagaggggatcttgcgacaatccacggtatgaatcgcccttttctcctgctgatggccacaccccttgaacgggcgcaacatcttcagtcatcccgccataggagagcactggacacgaactactgtttttcgtcgacagagaagaattgctgcgtgcggcagctttacatcgacttccgaaaagatctcgggtggaaatggattcatgaaccgaaggggtatcacgccaacttctgcctgggtccgtgtccttatatctggtcgttggatacacagtattcaaaggtgttggctctttacaatcagcacaacccgggagcctcggctgcgccttgttgcgtaccccaggcattggagccattgccgattgtgtattatgtgggaagaaagccgaaagtggagcagttgtcgaatatgatcgtacggagctgcaaatgctcctgataagctgccttctgcggggcttgccttctggccatgcccttcttctctcccttgcacctgtacctcttggtctttgaataaagcctgagtaggaag

SEQ ID NO: 33912 - RNA, 806 nt, synthetic construct
  misc_feature 1..806: note = Description of Artificial Sequence: Synthetic transcript sequence
  source 1..806: mol_type = other RNA
gggaaataagagagaaaagaagagtaagaagaaatataagagccaccatgggtgtaaggcacccgccctgctcccacagactcctggcggtgtgtgccttggtatcgcttgcgaccgccgcactgcttgtcaatccgggggtagtcgtgcgcatcagccagaagggactggattacgcctcgcagcagggtaccgcggcacttcagaaagagcttaagcggatcaagattccagactattcagatagctttaagatcaagcatttgggaaaaggtcactattcgttttactcgatggacattagagaattccagctcccttcgtcccaaatttccatggtcccgaatgtggggctgaaattcagcatttcgaacgcgaacatcaagatctcagggaaatggaaggcacagaagcgatttctcaaaatgtcaggaaactttgatctctccatcgaggggatgtcaatctcggcggacttgaaactcggctccaatcctacatcgggaaagcccactattacggcctcgtcgtgttcgagccatatcaactcggtgcacgtccatatctcaaagtccaaagtaggatggcttatccagctcttccacaaaaagattgagtcggctttgcgcaacaagatgaatagccaagtgtgcgagaaagtcacaaattccgtgtcatcagaattgcagccctacttccaaacgctgtaatgagctgccttctgcggggcttgccttctggccatgcccttcttctctcccttgcacctgtacctcttggtctttgaataaagcctgagtaggaag

SEQ ID NO: 33913 - RNA, 1573 nt, synthetic construct
  misc_feature 1..1573: note = Description of Artificial Sequence: Synthetic transcript sequence
  source 1..1573: mol_type = other RNA
gggaaataagagagaaaagaagagtaagaagaaatataagagccaccatggtatccaagggggaggaggacaacatggcgatcatcaaggagttcatgcgattcaaggtgcacatggaaggttcggtcaacggacacgaatttgaaatcgaaggagagggtgaaggaaggccctatgaagggacacagaccgcgaaactcaaggtcacgaaagggggaccacttcctttcgcctgggacattctttcgccccagtttatgtacgggtccaaagcatatgtgaagcatcccgccgatattcctgactatctgaaactcagctttcccgagggattcaagtgggagcgggtcatgaactttgaggacgggggtgtagtcaccgtaacccaagactcaagcctccaagacggcgagttcatctacaaggtcaaactgcgggggactaactttccgtcggatgggccggtgatgcagaagaaaacgatgggatgggaagcgtcatcggagaggatgtacccagaagatggtgcattgaagggggagatcaagcagagactgaagttgaaagatgggggacattatgatgccgaggtgaaaacgacatacaaagcgaaaaagccggtgcagcttcccggagcgtataatgtgaatatcaagttggatattacttcacacaatgaggactacacaattgtcgaacagtacgaacgcgctgagggtagacactcgacgggaggcatggacgagttgtacaaaggaagcggagctactaacttcagcctgctgaagcaggctggagacgtggaggagaaccctggacctatggtgtccaagggtgaggaattgtttaccggggtggtgcctattctcgtcgaacttgacggggatgtgaatggacacaagttttcggtatccggagaaggagagggtgacgccacatacggaaagcttacactcaaattcatctgtacgacggggaaactgcccgtaccctggcctacgctcgtaaccacgctgacttatggagtgcagtgctttagcagataccccgaccatatgaagcagcacgacttcttcaagtcggcgatgcccgaggggtacgtgcaagagaggaccattttcttcaaagacgatggcaattacaaaacacgcgcagaagtcaagtttgagggcgatactctggtcaatcggatcgaattgaagggaatcgatttcaaagaagatggaaacatccttggccataagctcgagtacaactataactcgcataatgtctatatcatggctgacaagcagaaaaacggtatcaaagtcaactttaagatccgacacaatattgaggacggttcggtgcagcttgcggaccactatcaacagaatacgccgattggggatggtccggtccttttgccggataaccattatctctcaacccagtcagccctgagcaaagatccaaacgagaagagggaccacatggtcttgctcgaattcgtgacagcggcagggatcactctgggaatggacgagttgtacaagtgataatggtctttgaataaagcctgagtaggaag

SEQ ID NO: 33914 - RNA, 1568 nt, synthetic construct
  misc_feature 1..1568: note = Description of Artificial Sequence: Synthetic transcript sequence
  source 1..1568: mol_type = other RNA
gggaaataagagagaaaagaagagtaagaagaaatataagagccaccatggccgtgatggcgccgcggaccctggtcctcctgctgtcgggcgccctcgccctgacgcagacctgggccgaggtgcagctggtcgagagcggcgggggcctcgtgcagccgggcgggtcgctgcggctgagctgcgccgcgagcgggttcaacatcaaggacacctacatccactgggtgcgccaggcccccggcaagggcctcgagtgggtcgcccggatctaccccacgaacgggtacacccgctacgccgacagcgtgaagggccggttcaccatcagcgcggacacctcgaagaacacggcctacctgcagatgaacagcctgcgcgccgaggacaccgccgtgtactactgcagccggtggggcggcgacgggttctacgccatggactactgggggcagggcaccctcgtcaccgtgagcagcgcgtcgacgaaggggcccagcgtgttcccgctggcccccagcagcaagagcaccagcggcgggaccgccgccctgggctgcctcgtcaaggactacttccccgagcccgtgaccgtgtcgtggaacagcggcgcgctgacgagcggggtccacaccttcccggccgtgctgcagagcagcggcctctactcgctgagcagcgtggtcaccgtgcccagcagcagcctggggacccagacgtacatctgcaacgtgaaccacaagccctcgaacaccaaggtcgacaagaaggtggagcccaagagctgcgacaagacccacacctgcccgccctgccccgcccccgagctcctgggcgggcccagcgtgttcctgttcccgcccaagcccaaggacacgctcatgatcagccgcacccccgaggtcacctgcgtggtggtcgacgtgagccacgaggaccccgaggtgaagttcaactggtacgtcgacggcgtggaggtgcacaacgccaagaccaagccgcgggaggagcagtacaactcgacgtaccgcgtcgtgagcgtgctgaccgtcctgcaccaggactggctcaacggcaaggagtacaagtgcaaggtgagcaacaaggccctgcccgcgcccatcgagaagaccatcagcaaggccaaggggcagccccgggagccgcaggtgtacaccctgccccccagccgcgacgagctcacgaagaaccaggtcagcctgacctgcctggtgaagggcttctacccctcggacatcgccgtggagtgggagagcaacgggcagccggagaacaactacaagaccaccccgcccgtcctcgacagcgacggcagcttcttcctgtacagcaagctgacggtggacaagtcgcggtggcagcagggcaacgtgttcagctgcagcgtcatgcacgaggccctccacaaccactacacccagaagagcctgagcctgagccccgggtgataataggctgccttctgcggggcttgccttctggccatgcccttcttctctcccttgcacctgtacctcttggtctttgaataaagcctgagtaggaag

SEQ ID NO: 33915 - RNA, 863 nt, synthetic construct
  misc_feature 1..863: note = Description of Artificial Sequence: Synthetic transcript sequence
  source 1..863: mol_type = other RNA
gggaaataagagagaaaagaagagtaagaagaaatataagagccaccatggccgtgatggcgccgcggaccctggtcctcctgctgtcgggcgccctcgccctgacgcagacctgggccgacatccagatgacccagagcccgtcgagcctgagcgccagcgtgggcgaccgggtcacgatcacctgccgcgcgagccaggacgtgaacaccgccgtggcctggtaccagcagaagcccgggaaggcccccaagctcctgatctactcggcgagcttcctgtacagcggcgtccccagccggttcagcgggtcgcgcagcggcaccgacttcacgctcaccatcagcagcctgcagccggaggacttcgccacctactactgccagcagcactacaccacgccccccaccttcgggcagggcaccaaggtggagatcaagcggaccgtggccgcccccagcgtcttcatcttcccgcccagcgacgagcagctgaagtcgggcacggccagcgtggtgtgcctcctgaacaacttctacccccgcgaggcgaaggtccagtggaaggtggacaacgccctgcagagcgggaacagccaggagagcgtgaccgagcaggactcgaaggacagcacctacagcctcagcagcaccctgacgctgagcaaggccgactacgagaagcacaaggtctacgcctgcgaggtgacccaccaggggctctcgagccccgtgaccaagagcttcaaccggggcgagtgctgataataggctgccttctgcggggcttgccttctggccatgcccttcttctctcccttgcacctgtacctcttggtctttgaataaagcctgagtaggaag
